(19) United States
(12) Patent Application Publication
(10) Pub. No.: US 2013/0071394 A1
(43) Pub. Date: Mar. 21, 2013

(54) Compositions and combinations of organophosphorus bioscavengers and hyaluronan-degrading enzymes, and methods of use

(71) Applicants: John K. Troyer, Towson, MD (US); Elizabeth Leffel, Berryville, VA (US)

(72) Inventors: John K. Troyer, Towson, MD (US); Elizabeth Leffel, Berryville, VA (US)

(21) Appl. No.: 13/573,472

(22) Filed: Sep. 14, 2012

Related U.S. Application Data
(60) Provisional application No. 61/627,142, filed on Sep. 16, 2011.

(51) Int. Cl. A61K 38/47; A61K 38/46; A61M 5/19; B65D 25/00; B65D 81/32; A61K 45/06; A61K 39/395

(52) U.S. Cl. CPC A61K 38/47; A61K 45/06; A61K 38/465; A61K 38/46; A61K 39/395; B65D 25/00; B65D 81/32; A61M 5/19
USPC 424/134.1; 424/94.62; 220/500; 206/219; 604/191

(57) ABSTRACT

Provided are compositions and combinations containing an organophosphorus bioscavenger and a hyaluronan-degrading enzyme. The provided compositions and combinations can be used to treat or prevent organophosphorus poisoning, including nerve agent poisoning and pesticide poisoning.

### RELATED APPLICATIONS

[0001] Benefit of priority is claimed to U.S. Provisional Application Ser. No. 61/627,142 to John K. Troyer and Elizabeth K. Leffel, entitled “COMPOSITIONS AND COMBINATIONS OF ORGANOPHOSPHORUS BIOSCAVENGERS AND HYALURONAN-DEGRADING ENZYMES, AND METHODS OF USE,” filed Sep. 16, 2011. The subject matter of the above-referenced applications is incorporated by reference in its entirety.

[0002] This application is related to International PCT Patent Application No. (Attorney Dkt. No. 33320.03102.WO01/3102PC), filed the same day herewith, entitled “COMPOSITIONS AND COMBINATIONS OF ORGANOPHOSPHORUS BIOSCAVENGERS AND HYALURONAN-DEGRADING ENZYMES, AND METHODS OF USE,” which claims priority to U.S. Provisional Application Ser. No. 61/627,142.

[0003] The subject matter of the above-noted related application is incorporated by reference in its entirety.

### GOVERNMENT LICENSE RIGHTS

[0004] Work described herein was made with government support under Grant Number U01 NS058207 awarded by the CounterACT Program, Office of the Director, National Institutes of Health (OD) and the National Institute of Neurological Disorders and Stroke (NINDS). The United States Government has certain rights in such subject matter.

### INCORPORATION BY REFERENCE OF SEQUENCE LISTING PROVIDED ON COMPACT DISCS

[0005] An electronic version on compact disc (CD-R) of the Sequence Listing is filed herewith in duplicate (labeled Copy 1 and Copy 2), the contents of which are incorporated by reference in their entirety. The computer-readable file on each of the aforementioned compact discs, created on Sep. 14, 2012, is identical, 1285 kilobytes in size, and titled 3102seq.001.txt.

### FIELD OF INVENTION

[0006] Provided herein are compositions and combinations of organophosphate bioscavengers and hyaluronan-degrading enzymes. Such compositions and combinations can be used in methods of treating organophosphorus poisoning, including nerve agent poisoning and organophosphorus pesticide poisoning.

### BACKGROUND

[0007] Use of organophosphorus and related compounds as pesticides and in warfare over the last several decades has resulted in a rising number of cases of acute and delayed intoxication, causing damage to the peripheral and central nervous systems and resulting in myopathy, psychosis, general paralysis, and death. Such noxious agents act by inhibiting cholinesterase enzymes and thereby preventing the breakdown of neurotransmitters, such as acetylcholine, causing hyperactivity of the nervous system. For example, build-up of acetylcholine causes continued stimulation of the muscarinic receptor sites (exocrine glands and smooth muscles) and the nicotinic receptor sites (skeletal muscles). In addition, exposure to cholinesterase-inhibiting substances can cause symptoms ranging from mild (e.g., twitching, trembling) to severe (e.g., paralyzed breathing, convulsions), and in extreme cases, death, depending on the type and amount of cholinesterase-inhibiting substances involved.

[0008] Organophosphorus poisoning can be treated by intravenous or intramuscular administration of combinations of drugs, including carbamates (e.g., pyridostigmine), anti-muscarinics (e.g., atropine), cholinesterase reactivators (ChE-reactivators) such pralidoxime chloride (2-PAM, Protopam) and anti-convulsives. Alternatively, organophosphorus poisoning can be treated by administration of organophosphorus bioscavengers that bind to or hydrolyze organophosphorus compounds before they reach their physiological targets and exert toxic effects on the subject. Improved compositions for treatment of organophosphorous poisoning are needed.

### SUMMARY

[0009] Provided herein are compositions containing an organophosphorus (OP) bioscavenger and a hyaluronan-degrading enzyme. In some examples, the compositions provided herein are formulated for single dosage administration. Also provided herein are combinations containing a first composition containing an organophosphorus bioscavenger and a second composition containing a hyaluronan-degrading enzyme. Also provided herein are containers containing two compartments wherein a first compartment contains a therapeutically effective amount of an organophosphorus bioscavenger, wherein the amount is for single dosage or a plurality of dosages and a single dosage is effective for prevention of organophosphorus poisoning and a second compartment contains a therapeutically effective amount of hyaluronan-degrading enzyme, wherein the therapeutically effective amount of hyaluronan-degrading enzyme is effective to increase bioavailability or absorption of the organophosphorus bioscavenger. Provided herein are methods for preventing organophosphorus poisoning by administering a composition or combination provided herein. Also provided herein are methods for treating organophosphorus poisoning by administering a composition or combination provided herein. Provided herein are methods for preventing organophosphorus poisoning wherein the method involves administering to a subject an organophosphorus bioscavenger and a hyaluronan-degrading enzyme. Also provided herein are methods for treating organophosphorus poisoning, wherein the method involves administering an organophosphorus bioscavenger and a hyaluronan-degrading enzyme. Any of the methods provided herein can further contain a step of administering another pharmaceutical agent selected from among carbamates, anti-muscarinics, cholinesterase reactivators and anti-convulsives. Also provided are uses and compositions containing an organophosphorus bioscavenger and a hyaluronan-degrading enzyme for treating or preventing organophosphorus poisoning.

[0010] Provided herein are compositions containing an organophosphorus (OP) bioscavenger and a hyaluronan-degrading enzyme. In some examples, the compositions provided herein are formulated for single dosage administration. Also provided herein are combinations containing a first composition containing an organophosphorus bioscavenger and a second composition containing a hyaluronan-degrading enzyme.

[0011] In some examples, the provided compositions and containers contain an organophosphorus bioscavenger that is present in the composition in an amount between or between about 1 μg to 100 mg, 1 μg to 100 mg, 1 μg to 50 mg, 1 μg to 10 mg, 1 μg to 1 mg, 1 μg to 500 μg, 1 μg to 250 μg, 1 μg to 100 μg, 50 μg to 50 mg, 50 μg to 25 mg, 50 μg to 10 mg, 50 μg to 1 mg, 50 μg to 500 μg, 50 μg to 250 μg, 100 μg to 50 mg, 100 μg to 10 mg, 100 μg to 1 mg, 100 μg to 500 μg, 100 μg to 250 μg, 250 μg to 50 mg, 250 μg to 25 mg, 250 μg to 10 mg, 250 μg to 1 mg, 250 μg to 500 μg, 500 μg to 100 mg, 500 μg to 50 mg, 500 μg to 25 mg, 500 μg to 10 mg, 500 μg to 1 mg, 1 mg to 500 mg, 1 mg to 250 mg, 1 mg to 100 mg, 50 mg to 1000 mg, 250 mg to 1000 mg, 250 mg to 750 mg, 250 mg to 500 mg, 500 mg to 1000 mg, 500 mg to 750 mg, or is at least or is about at least 1 μg, 10 μg, 50 μg, 100 μg, 250 μg, 500 μg, 1 mg, 10 mg, 50 mg, 100 mg, 250 mg, 500 mg, 750 mg or 1000 mg when a single dosage is administered.

[0012] In other examples, the provided compositions and containers contain an OP bioscavenger is present in the composition in an amount between 1 to 1000 μg/mL, 1 to 500 μg/mL, 1 to 250 μg/mL, 1 to 100 mg/mL, 50 to 1000 mg/mL, 50 to 750 μg/mL, 50 to 500 μg/mL, 50 to 250 μg/mL, 100 to 1000 μg/mL, 100 to 500 μg/mL, 100 to 250 μg/mL, 250 to 1000 μg/mL, 250 to 750 mg/mL, 250 to 500 μg/mL, 500 to 1000 μg/mL, 0.5 to 50 mg/mL, 0.5 to 10 mg/mL, 0.5 to 1 mg/mL, 1 to 100 mg/mL, 1 to 50 mg/mL, 1 to 25 mg/mL, 1 to 1000 mg/mL, 1 to 500 mg/mL, 1 to 250 mg/mL, 10 to 500 mg/mL, 10 to 250 mg/mL, 10 to 150 mg/mL, 10 to 100 mg/mL, 10 to 50 mg/mL, 50 to 1500 mg/mL, 50 to 1000 mg/mL, 50 to 750 mg/mL, 50 to 500 mg/mL, 50 to 250 mg/mL, 100 to 1500 mg/mL, 100 to 1000 mg/mL, 100 to 750 mg/mL, 100 to 500 mg/mL, 100 to 7500 mg/mL, 100 to 5000 mg/mL, 100 to 2500 mg/mL, 500 to 7500 mg/mL, 500 to 5000 mg/mL, 500 to 2500 mg/mL, or 500 to 1000 mg/mL.

[0013] The hyaluronan-degrading enzyme in the provided compositions and combinations can be present in the composition an amount between 0.5 mg/mL to 100 mg/mL, 0.5 mg/mL to 50 mg/mL, 0.5 mg/mL to 10 mg/mL, 1 mg/mL to 250 mg/mL, 1 mg/mL to 100 mg/mL, 1 mg/mL to 50 mg/mL, 50 mg/mL to 500 mg/mL, 50 mg/mL to 250 mg/mL, 50 mg/mL to 100 mg/mL, 100 mg/mL to 500 mg/mL, 100 mg/mL to 250 mg/mL or 250 mg/mL to 500 mg/mL. In some examples, the hyaluronan-degrading enzyme is present in the compositions and combinations provided herein in an amount between or about between 10 U/mL to 5000 U/mL, 50 U/mL to 4000 U/mL, 100 U/mL to 2000 U/mL, 300 U/mL to 2000 U/mL, 600 U/mL to 2000 U/mL, or 100 U/mL to 1000 U/mL. In other examples, the compositions and combinations provided herein contain hyaluronan-degrading enzyme in an amount between or about between at least or is about or is 30 U/mL, 35 U/mL, 40 U/mL, 50 U/mL, 100 U/mL, 150 U/mL, 200 U/mL, 250 U/mL, 300 U/mL, 350 U/mL, 400 U/mL, 450 U/mL, 500 U/mL, 600 U/mL, 700 U/mL, 800 U/mL, 900 U/mL, 1000 U/mL or 2000 U/mL.

[0014] In the provided compositions and combinations, the volume of the composition can be between or between about 0.5 mL to 15 mL, 1 mL to 10 mL, 2 mL to 8 mL, 5 mL to 7 mL or 4 mL to 6 mL. In some examples, the organophosphorus bioscavenger is present in the composition in an amount between or about between 50 mg/mL to 200 mg/mL and the volume of the composition is between or between about 5 mL to 7 mL. In other examples, the organophosphorus bioscavenger is present in the composition in an amount between or about between 50 mg/mL to 200 mg/mL and the volume of the composition is between or between about 4 mL to 6 mL.

[0015] Also provided herein are containers containing two compartments wherein a first compartment contains a therapeutically effective amount of an organophosphorus bioscavenger, wherein the amount is for single dosage or a plurality of dosages and a single dosage is effective for prevention of organophosphorus poisoning and a second compartment contains a therapeutically effective amount of hyaluronan-degrading enzyme, wherein the therapeutically effective amount of hyaluronan-degrading enzyme is effective to increase bioavailability or absorption of the organophosphorus bioscavenger. The organophosphorus poisoning can be organophosphorus pesticide poisoning or nerve agent poisoning. In some examples, the containers further include a mixing compartment. The containers can be a tube or bottle, or alternatively, a syringe. In some examples, the container includes a needle for injection.

[0016] In some examples of the containers provided herein, the organophosphorus bioscavenger and hyaluronan-degrading enzyme are provided in an amount for multiple dosage administration. In other examples, the organophosphorus bioscavenger and hyaluronan-degrading enzyme are provided in a single unit dosage. For example, the organophosphorus bioscavenger in the container is for single dosage administration and is present in an amount between or between about 1 μg to 100 mg, 1 μg to 100 mg, 1 μg to 50 mg, 1 μg to 10 mg, 1 μg to 1 mg, 1 μg to 500 μg, 1 μg to 250 μg, 1 μg to 100 μg, 50 μg to 50 mg, 50 μg to 25 mg, 50 μg to 10 mg, 50 μg to 1, mg, 50 μg to 500 μg, 50 μg to 250 μg, 100 μg to 50 mg, 100 μg to 10 mg, 100 μg to 1 mg, 100 μg to 500 μg, 100 μg to 250 μg, 250 μg to 50 mg, 250 μg to 25 mg, 250 μg to 10 mg, 250 μg to 1 mg, 250 μg to 500 μg, 500 μg to 100 mg, 500 μg to 50 mg, 500 μg to 25 mg, 500 μg to 10 mg, 500 μg to 1 mg, 1 mg to 500 mg, 1 mg to 250 mg, 1 mg to 100 mg, 50 mg to 1000 mg, 250 mg to 1000 mg, 250 mg to 750 mg, 250 mg to 500 mg, 500 mg to 1000 mg, 500 mg to 750 mg, or is at least or is about at least 1 μg, 10 μg, 50 μg, 100 μg, 250 μg, 500 μg, 1 mg, 10 mg, 50 mg, 100 mg, 250 mg, 500 mg, 750 mg or 1000 mg when a single dosage is administered. In another example, the organophosphorus bioscavenger is present in an amount between or about between 10 to 500 mg/mL, 10 to 250 mg/mL, 10 to 150 mg/mL, 10 to 100 mg/mL, 10 to 50 mg/mL, 50 to 1500 mg/mL, 50 to 1000 mg/mL, 50 to 750 mg/mL, 50 to 500 mg/mL, 50 to 250 mg/mL, 100 to 1500 mg/mL, 100 to 1000 mg/mL, 100 to 750 mg/mL, 100 to 500 mg/mL, 100 to 7500 mg/mL, 100 to 5000 mg/mL, 100 to 2500 mg/mL, 500 to 7500 mg/mL, 500 to 5000 mg/mL, 500 to 2500 mg/mL, or 500 to 1000 mg/mL. In the containers provided herein, the total volume of the liquid in the container can be from or be from about 0.1 to 10 mL, 0.1 to 5 mL, 0.1 to 3 mL, 0.1 to 1 mL, 1 to 10 mL, 3 to 10 mL, 5 to 10 mL, 5 to 7 mL, 4 to 6 mL, 1 to 5 mL, 1 to 3 mL or 3 to 5 mL.

[0017] In some examples of a container provided herein, the hyaluronan-degrading enzyme is present in an amount between or about between 10 U/mL to 5000 U/mL, 50 U/mL to 4000 U/mL, 100 U/mL to 2000 U/mL, 300 U/mL to 2000 U/mL, 600 U/mL to 2000 U/mL, or 100 U/mL to 1000 U/mL. In other examples, the hyaluronan-degrading enzyme is present in an amount between or about between at least or is about or is 30 U/mL, 35 U/mL, 40 U/mL, 50 U/mL, 100 U/mL, 150 U/mL, 200 U/mL, 250 U/mL, 300 U/mL, 350 U/mL, 400 U/mL, 450 U/mL, 500 U/mL, 600 U/mL, 700 U/mL, 800 U/mL, 900 U/mL, 1000 U/mL or 2000 U/mL.

[0018] Also provided herein is a container containing two compartments, wherein a first compartment contains a therapeutically effective amount of a butyrylcholinesterase, wherein the amount is effective for preventing organophosphorus poisoning and a second compartment contains a sufficient amount of a hyaluronan-degrading enzyme to increase bioavailability or absorption of the organophosphorus bioscavenger. The organophosphorus poisoning can be organophosphorus pesticide poisoning or nerve agent poisoning. In some examples, the butyrylcholinesterase has a sequence of amino acids set forth in SEQ ID NO:236, or is an allelic or species variant or any other variant of SEQ ID NO:236. The butyrylcholinesterase can be present in the provided container an amount between or between about 250 mg to 1000 mg, 250 mg to 750 mg, 250 mg to 500 mg, 500 mg to 1000 mg, 500 mg to 750 mg, or is or is about 250 mg, 500 mg, 750 mg or 1000 mg; or is present at 10 to 500 mg/mL, 10 to 250 mg/mL, 10 to 150 mg/mL, 10 to 100 mg/mL, 10 to 50 mg/mL, 50 to 1500 mg/mL, 50 to 1000 mg/mL, 50 to 750 mg/mL, 50 to 500 mg/mL, 50 to 250 mg/mL, 100 to 1500 mg/mL, 100 to 1000 mg/mL, 100 to 750 mg/mL, 100 to 500 mg/mL, 100 to 7500 mg/mL, 100 to 5000 mg/mL, 100 to 2500 mg/mL, 500 to 7500 mg/mL, 500 to 5000 mg/mL, 500 to 2500 mg/mL, or 500 to 1000 mg/mL.

[0019] In some examples of the containers provided herein, the organophosphorus bioscavenger can be in solution or suspension. In other examples of the containers provided herein, the hyaluronan-degrading enzyme can be in solution or suspension. In yet other examples of the containers provided herein, both the OP bioscavenger and the hyaluronan-degrading enzyme are in solution or suspension. In the containers provided herein, the volume of the solution or suspension in the container can be between or between about 0.5 mL to 15 mL, 1 mL to 10 mL, 2 mL to 8 mL, 5 mL to 7 mL or 4 mL to 6 mL. In some examples, the organophosphorus bioscavenger is present in solution or suspension in an amount between or about between 50 mg/mL to 200 mg/mL and the volume of the solution or suspension is between or between about 5 mL to 7 mL. In other examples, the organophosphorus bioscavenger is present in solution or in suspension in an amount between or about between 50 mg/mL to 200 mg/mL and the volume of the solution or suspension is between or between about 4 mL to 6 mL. In some examples of the containers provided herein, the organophosphorus bioscavenger is lyophilized. In other examples, the hyaluronan-degrading enzyme is lyophilized. In yet other examples, both the OP bioscavenger and the hyaluronan-degrading enzyme are lyophilized.

[0020] The OP bioscavenger in the compositions, combinations and containers provided herein can be an esterase, cholinesterase, paraoxonase, aryldialkylphosphatase or diisopropylfluorophosphatase. For example, the OP bioscavenger is selected from among acetylcholinesterase (AChE), butyrylcholinesterase (BChE), prolidase, organophosphate acid anhydrolase (OPAA), phosphotriesterase, aryldialkylphosphatase, organophosphorus hydrolase (OPH), parathion hydrolase, diisopropylfluorophosphatase (DFPase), organophosphorus acid anhydrase, sarinase and paraoxonase (PON). In one embodiment, the OP bioscavenger is an active portion or a variant of an acetylcholinesterase (AChE), butyrylcholinesterase (BChE), prolidase, organophosphate acid anhydrolase (OPAA), phosphotriesterase, aryldialkylphosphatase, organophosphorus hydrolase (OPH), parathion hydrolase, diisopropylfluorophosphatase (DFPase), organophosphorus acid anhydrase, sarinase or paraoxonase (PON) that exhibits at least 80%, 85%, 90%, 95%, or more OP binding or inactivating activity.

[0021] In some examples provided herein, the organophosphorus bioscavenger has a sequence of amino acids set forth in any of SEQ ID NOS: 214-256 and 258-301. In other examples, the OP bioscavenger is an active portion thereof or a variant thereof that exhibits at least 80%, 85%, 90%, 95%, or more sequence identity to any of SEQ ID NOS: 214-256 and 258-301. In such examples, the active portion or variant exhibits OP binding or inactivating activity. For example, the active portion or variant can exhibit at least 40%, 50%, 60%, 70%, 80%, 90%, or more activity compared to the corresponding organophosphorus bioscavenger set forth in any of SEQ ID NOS: 214-256 and 258-301.

[0022] In some examples, the OP bioscavenger in the compositions, combinations and containers provided herein is a variant that has a sequence of amino acids that contains an amino acid modification compared to organophosphorus bioscavenger that has a sequence of amino acids set forth in any of SEQ ID NOS: 214-256 and 258-301. The amino acid modification can be an amino acid replacement or substitution, deletion or addition. In some examples, the variant exhibits increased catalytic activity or other inhibitory activity compared to the organophosphorus bioscavenger not containing the amino acid modification.

[0023] In some embodiments, the compositions, combinations and containers provided herein contain an organophosphorus bioscavenger that is a cholinesterase. For example, the OP bioscavenger is a cholinesterase that is an acetylcholinesterase or butyrylcholinesterase. The cholinesterase can be a monomer, dimer or a tetramer. In an exemplary embodiment, the organophosphorus bioscavenger is butyrylcholinesterase. For example, the OP bioscavenger is a butyrylcholinesterase that has a sequence of amino acids set forth in SEQ ID NO:236, or is an active portion thereof or is a variant thereof that exhibits at least 85% sequence identity to a sequence of amino acids set forth in SEQ ID NO:236. For example, the butyrylcholinesterase has at least 86%, 87%, 88%, 89%, 90%, 91%, 92%, 93%, 94%, 95%, 96%, 97%, 98% or 99% sequence identity to a sequence of amino acids set forth in SEQ ID NO:236 and exhibits OP binding or inactivating activity. In some examples provided herein, the organophosphorus bioscavenger is a cholinesterase and the active portion is a truncated fragment lacking a tryptophan amphiphilic tetramerization (WAT) domain.

[0024] In some examples, the OP bioscavenger in the provided compositions, combinations and containers exhibits a half-life of at least 30 hours, 40 hours, 50 hours, 60 hours, 70 hours, 80 hours, 90 hours or 100 hours; or between or about between 30 hours to 130 hours, 40 hours to 100 hours, 40 hours to 80 hours, 40 hours to 60 hours.

[0025] The organophosphorus bioscavenger in the compositions, combinations and containers provided can be modified with a polymer. For example, the OP bioscavenger can be modified with a polymer that is a polyethylene glycol (PEG). In other examples, the OP bioscavenger can be linked directly or indirectly via a linker to an immunoglobulin, immunoglobulin domain, albumin, transferrin, or transferrin receptor protein. The linker can be a chemical linker or a polypeptide linker, for example, a peptide, polypeptide and an amino acid.

[0026] The hyaluronan-degrading enzyme in the compositions, combinations and containers provided herein can be a hyaluronidase or a chondroitinase, or a variant or a truncated form thereof that exhibits hyaluronan-degrading activity. In some examples, the hyaluronan-degrading enzyme is a hyaluronidase that is active at neutral pH. For example, the hyaluronan-degrading enzyme is a Hyal1, Hyal2, Hyal4 or PH20 hyaluronidase, or a variant or a truncated form thereof that exhibits hyaluronidase activity. In a specific example, the hyaluronan-degrading enzyme is a hyaluronidase that is a PH20 or a variant or a truncated form thereof that exhibits hyaluronidase activity. For example, the hyaluronidase is a PH20 that is a non-human or a human PH20 or variant or a truncated form thereof that exhibits hyaluronidase activity. Such PH20 hyaluronidases include human, monkey, bovine, ovine, rat, mouse or guinea pig PH20, or a variant or a truncated form thereof that exhibits hyaluronidase activity.

[0027] In some examples of the provided compositions, combinations and containers, the hyaluronan-degrading enzyme lacks all or a portion of a glycophosphatidylinositol (GPI) anchor or is not membrane-associated when expressed from a cell. For example, the hyaluronan-degrading enzyme contains C-terminal truncations of one or more amino acid residues to remove all or part of a GPI anchor. In a specific example, the hyaluronan-degrading enzyme is a truncated human PH20 that has a sequence of amino acids set forth in SEQ ID NO:1 that contains a C-terminal truncation after amino acid position 465, 466, 467, 468, 469, 470, 471, 472, 473, 474, 475, 476, 477, 478, 479, 480, 481, 482, 483, 484, 485, 486, 487, 488, 489, 490, 491, 492, 493, 494, 495, 496, 497, 498, 499 or 500 of the sequence of amino acids set forth in SEQ ID NO:1, or is a variant thereof that exhibits at least 85% sequence identity to a sequence of amino acids that contains a C-terminal truncation after amino acid position 465, 466, 467, 468, 469, 470, 471, 472, 473, 474, 475, 476, 477, 478, 479, 480, 481, 482, 483, 484, 485, 486, 487, 488, 489, 490, 491, 492, 493, 494, 495, 496, 497, 498, 499 or 500 of the sequence of amino acids set forth in SEQ ID NO:1 and exhibits hyaluronidase activity.

[0028] In other examples provide herein, the PH20 in the provided compositions, combinations and containers has at least 86%, 87%, 88%, 89%, 90%, 91%, 92%, 93%, 94%, 95%, 96%, 97%, 98% or 99% sequence identity to a sequence of amino acids that contains that contains a C-terminal truncation after amino acid position 465, 466, 467, 468, 469, 470, 471, 472, 473, 474, 475, 476, 477, 478, 479, 480, 481, 482, 483, 484, 485, 486, 487, 488, 489, 490, 491, 492, 493, 494, 495, 496, 497, 498, 499 or 500 of the sequence of amino acids set forth in SEQ ID NO:1 and exhibits hyaluronidase activity. In a specific example, the PH20 has a sequence of amino acids that contains at least amino acids 36-464 of SEQ ID NO:1, or has a sequence of amino acids that has at least 85% sequence identity to a sequence of amino acids that contains at least amino acids 36-464 of SEQ ID NO:1 and exhibits hyaluronidase activity. In other examples, the PH20 has at least 86%, 87%, 88%, 89%, 90%, 91%, 92%, 93%, 94%, 95%, 96%, 97%, 98% or 99% sequence identity to a sequence of amino acids that contains at least amino acids 36-464 of SEQ ID NO:1 and exhibits hyaluronidase activity. In one embodiment, the PH20 is truncated at an amino acid corresponding to 477, 478, 479, 480, 481, 482, 483, 484, 485, 486. 487, 488, 489, 490, 491, 492, 494, 494, 495, 496, 497, 498, 499 or 500 of the sequence of amino acids set forth in SEQ ID NO:1 and exhibits hyaluronidase activity.

[0029] In another example, hyaluronan-degrading enzyme in the provided compositions, combinations and containers is a C-terminal truncated PH20 that contains a sequence of amino set forth in any of SEQ ID NOS: 4-9. In some instances, the hyaluronan-degrading enzyme is modified with a polymer, such as a polyethylene glycol (PEG).

[0030] Also provided herein are kits containing a composition provided herein and optionally instructions for use. Also provided herein are kits containing a combination provided herein and optionally instructions for use.

[0031] Also provided herein are combinations containing any container provided herein and one or more additional containers containing another pharmacologically effective agent selected from among carbamates, anti-muscarinics, cholinesterase reactivators and anti-convulsives. In some examples, the pharmacologically effective agents are provided in separate containers. In one example, the additional container contains at least two pharmacologically effective agents and the agents are provided as separate compositions separated from each other. In another example, the pharmacologically effective agents are provided in the same container in the same composition. In specific examples, the additional container contains a carbamate, anti-muscarinic and cholinesterase reactivator. In some examples, the additional container(s) is a syringe. In some combinations provided herein, the additional agents are in solution or suspension and the total volume of solution or suspension in the additional container(s) is from or is from about 0.1 to 10 mL, 0.1 to 5 mL, 0.1 to 3 mL, 0.1 to 1 mL, 1 to 10 mL, 3 to 10 mL, 5 to 10 mL, 1 to 5 mL, 1 to 3 mL or 3 to 5 mL.

[0032] Also provided herein are kits containing any container provided herein, a device for administration and, optionally instructions for administration. Also provided herein are kits containing any combination provided herein, a device for administration and, optionally instructions for administration.

[0033] Provided herein are methods for preventing organophosphorus poisoning by administering a composition or combination provided herein. Also provided herein are methods for treating organophosphorus poisoning by administering a composition or combination provided herein. Provided herein are methods for preventing organophosphorus poisoning wherein the method involves administering to a subject an organophosphorus bioscavenger and a hyaluronan-degrading enzyme. Also provided herein are methods for treating organophosphorus poisoning, wherein the method involves administering an organophosphorus bioscavenger and a hyaluronan-degrading enzyme.

[0034] In some examples of the methods provided herein, the organophosphorus bioscavenger and hyaluronan-degrading enzyme are administered parenterally. In other examples of the methods provided herein, the organophosphorus bioscavenger and hyaluronan-degrading enzyme are administered by subcutaneous administration, intramuscular administration, intralesional administration or intradermal administration. In an exemplary embodiment, the organophosphorus bioscavenger and hyaluronan-degrading enzyme are administered by intramuscular administration.

[0035] In some examples of the methods provided herein, the organophosphorus bioscavenger is administered in an amount between or about between 1 μg to 100 mg, 1 μg to 100 mg, 1 μg to 50 mg, 1 μg to 10 mg, 1 μg to 1 mg, 1 μg to 500 μg, 1 μg to 250 μg, 1 μg to 100 μg, 50 μg to 50 mg, 50 μg to 25 mg, 50 μg to 10 mg, 50 μg to 1 mg, 50 μg to 500 μg, 50 μg to 250 μg, 100 μg to 50 mg, 100 μg to 10 mg, 100 μg to 1 mg, 100 μg to 500 μg, 100 μg to 250 μg, 250 μg to 50 mg, 250 μg to 25 mg, 250 μg to 10 mg, 250 μg to 1 mg, 250 μg to 500 μg, 500 μg to 100 mg, 500 μg to 50 mg, 500 μg to 25 mg, 500 μg to 10 mg, 500 μg to 1 mg, 1 mg to 500 mg, 1 mg to 250 mg, 1 mg to 100 mg, 50 mg to 1000 mg, 250 mg to 1000 mg, 250 mg to 750 mg, 250 mg to 500 mg, 500 mg to 1000 mg, 500 mg to 750 mg, or is at least or is about at least 1 μg, 10 μg, 50 μg, 100 μg, 250 μg, 500 μg, 1 mg, 10 mg, 50 mg, 100 mg, 250 mg, 500 mg, 750 mg or 1000 mg when a single dosage is administered.

[0036] In other examples of the methods provided herein, the hyaluronan-degrading enzyme is administered at a dosage between or about between 10,000 Units to 6,000,000 Units, for example, between 10,000 U to 150,000 U, 10,000 U to 100,000 U, 10,000 U to 50,000 U, 50,000 U to 200,000 U, 50,000 U to 150,000 U, 50,000 U to 100,000 U, 10,000 U to 1,000,000 U, 50,000 U to 1,000,000 U, 500,000 U to 6,000,000 U, 500,000 U to 4,000,000 U, 500,000 U to 2,000,000 U, 500,000 U to 1,000,000 U, 1,000,000 U to 6,000,000 U, 1,000,000 U to 5,000,000 U, 1,000,000 U to 4,000,000 U, 1,000,000 U to 3,000,000 U, 1,000,000 U to 2,000,000 U, 2,000,000 U to 6,000,000 U, 2,000,000 U to 5,000,000 U, 2,000,000 U to 4,000,000 U, 2,000,000 U to 3,000,000 U, 3,000,000 U to 6,000,000 U, 4,000,000 U to 6,000,000 U, 5,000,000 U to 6,000,000 U, or is at least or least about or is 10,000 U, 20,000 U, 30,000 U, 40,000 U, 50,000 U, 60,000 U, 70,000 U, 80,000 U, 90,000 U, 100,000 U, 110,000 U, 120,000 U, 130,000 U, 140,000 U, 150,000 U, 160,000 U, 170,000 U, 180,000 U, 190,000 U, 200,000 U, 300,000 U, 400,000 U, 500,000 U, 600,000 U, 700,000 U, 800,000 U, 900,000 U, 1,000,000 U, 1,500,000 U, 2,000,000 U, 2,500,000 U, 3,000,000 U, 3,500,000 U, 4,000,000 U, 5,000,000 U, 6,000,000 U or more, per single dosage.

[0037] In some examples of the methods provided herein, the composition is administered between at or about 6 to 48 hours, 6 to 36 hours, 6 to 24 hours, 12 to 48 hours, 12 to 36 hours, 12 to 24 hours, 24 to 48 hours, 24 to 36 hours, or at or about 6, 7, 8, 9, 10, 11, 12, 13, 14, 15, 16, 17, 18, 24, 30, 36, 42 or 48 hours before exposure to the organophosphorus compound.

[0038] Any of the methods provided herein can further contain a step of administering another pharmaceutical agent selected from among carbamates, anti-muscarinics, cholinesterase reactivators and anti-convulsives. In any of the methods provided herein, the compositions can be administered by percutaneous administration. For example, the compositions are administered by subcutaneous or intramuscular administration. In an exemplary embodiment, the compositions are administered by intramuscular administration.

[0039] Provided herein are uses and pharmaceutical compositions containing a provided composition or combination for use in treating or preventing organophosphorus poisoning. Also provided herein are uses or pharmaceutical compositions containing an organophosphorus bioscavenger and a hyaluronan-degrading enzyme for use in treating or preventing organophosphorus poisoning. Provided herein are uses containing a provided combination or composition for formulation of a medicament for use in treating or preventing organophosphorus poisoning.

[0040] In such uses and compositions, the compositions and combinations of an organophosphorus bioscavenger and a hyaluronan-degrading enzyme can be formulated for percutaneous administration. For example, the uses or compositions are formulated for subcutaneous administration, intramuscular administration, intralesional administration or intradermal administration. In one example, the uses or compositions are formulated to subcutaneous or intramuscular administration. In an exemplary embodiment, the uses or compositions are formulated for intramuscular administration. In some examples of the uses and compositions provided herein, the hyaluronan-degrading enzyme is formulated in the same composition as the organophosphorus bioscavenger or in a separate composition.

[0041] In any of the uses or compositions provided herein, the organophosphorus bioscavenger can be present in the composition an amount between or between about 1 μg to 100 mg, 1 μg to 100 mg, 1 μg to 50 mg, 1 μg to 10 mg, 1 μg to 1 mg, 1 μg to 500 μg, 1 μg to 250 μg, 1 μg to 100 μg, 50 μg to 50 mg, 50 μg to 25 mg, 50 μg to 10 mg, 50 μg to 1 mg, 50 μg to 500 μg, 50 μg to 250 μg, 100 μg to 50 mg, 100 μg to 10 mg, 100 μg to 1 mg, 100 μg to 500 μg, 100 μg to 250 μg, 250 μg to 50 mg, 250 μg to 25 mg, 250 μg to 10 mg, 250 μg to 1 mg, 250 μg to 500 μg, 500 μg to 100 mg, 500 μg to 50 mg, 500 μg to 25 mg, 500 μg to 10 mg, 500 μg to 1 mg, 1 mg to 500 mg, 1 mg to 250 mg, 1 mg to 100 mg, 50 mg to 1000 mg, 250 mg to 1000 mg, 250 mg to 750 mg, 250 mg to 500 mg, 500 mg to 1000 mg, 500 mg to 750 mg, or is at least or is about at least 1 μg, 10 μg, 50 μg, 100 μg, 250 μg, 500 μg, 1 mg, 10 mg, 50 mg, 100 mg, 250 mg, 500 mg, 750 mg or 1000 mg per single dosage.

[0042] In any of the uses or compositions provided herein, the hyaluronan-degrading enzyme can be present in the composition in an amount between or about between 10,000 Units to 6,000,000 Units, for example, between 10,000 U to 150,000 U, 10,000 U to 100,000 U, 10,000 U to 50,000 U, 50,000 U to 200,000 U, 50,000 U to 150,000 U, 50,000 U to 100,000 U, 10,000 U to 1,000,000 U, 50,000 U to 1,000,000 U, 500,000 U to 6,000,000 U, 500,000 U to 4,000,000 U, 500,000 U to 2,000,000 U, 500,000 U to 1,000,000 U, 1,000,000 U to 6,000,000 U, 1,000,000 U to 5,000,000 U, 1,000,000 U to 4,000,000 U, 1,000,000 U to 3,000,000 U, 1,000,000 U to 2,000,000 U, 2,000,000 U to 6,000,000 U, 2,000,000 U to 5,000,000 U, 2,000,000 U to 4,000,000 U, 2,000,000 U to 3,000,000 U, 3,000,000 U to 6,000,000 U, 4,000,000 U to 6,000,000 U, 5,000,000 U to 6,000,000 U, or is at least or least about or is 10,000 U, 20,000 U, 30,000 U, 40,000 U, 50,000 U, 60,000 U, 70,000 U, 80,000 U, 90,000 U, 100,000 U, 110,000 U, 120,000 U, 130,000 U, 140,000 U, 150,000 U, 160,000 U, 170,000 U, 180,000 U, 190,000 U, 200,000 U, 300,000 U, 400,000 U, 500,000 U, 600,000 U, 700,000 U, 800,000 U, 900,000 U, 1,000,000 U, 1,500,000 U, 2,000,000 U, 2,500,000 U, 3,000,000 U, 3,500,000 U, 4,000,000 U, 5,000,000 U, 6,000,000 U or more, per single dosage.

[0043] In the methods and uses and compositions provided herein, the OP bioscavenger can be an esterase, cholinesterase, paraoxonase, aryldialkylphosphatase or diisopropylfluorophosphatase. For example, the OP bioscavenger is selected from among acetylcholinesterase (AChE), butyrylcholinesterase (BChE), prolidase, organophosphate acid anhydrolase (OPAA), phosphotriesterase, aryldialkylphosphatase, organophosphorus hydrolase (OPH), parathion hydrolase, diisopropylfluorophosphatase (DFPase), organophosphorus acid anhydrase, sarinase and paraoxonase (PON). In one embodiment, the OP bioscavenger is an active portion or a variant of an acetylcholinesterase (AChE), butyrylcholinesterase (BChE), prolidase, organophosphate acid anhydrolase (OPAA), phosphotriesterase, aryldialkylphosphatase, organophosphorus hydrolase (OPH), parathion hydrolase, diisopropylfluorophosphatase (DFPase), organophosphorus acid anhydrase, sarinase or paraoxonase (PON) that exhibits at least 80%, 85%, 90%, 95%, or more OP binding or inactivating activity.

[0044] In some examples of the methods and uses and compositions provided herein, the organophosphorus bioscavenger has a sequence of amino acids set forth in any of SEQ ID NOS: 214-256 and 258-301. In other examples, the OP bioscavenger is an active portion thereof or a variant thereof that exhibits at least 80%, 85%, 90%, 95%, or more sequence identity to any of SEQ ID NOS: 214-256 and 258-301. In such examples, the active portion or variant exhibits OP binding or inactivating activity. For example, the active portion or variant can exhibit at least 40%, 50%, 60%, 70%, 80%, 90%, or more activity compared to the corresponding organophosphorus bioscavenger set forth in any of SEQ ID NOS: 214-256 and 258-301. In some examples of the methods provided herein, the active portion of an OP bioscavenger is a truncated fragment lacking a tryptophan amphiphilic tetramerization (WAT) domain.

[0045] In some examples of the methods and uses and compositions, the OP bioscavenger is a variant that has a sequence of amino acids that contains an amino acid modification compared to organophosphorus bioscavenger that has a sequence of amino acids set forth in any of SEQ ID NOS: 214-256 and 258-301. The amino acid modification can be an amino acid replacement or substitution, deletion or addition. In some examples, the variant exhibits increased catalytic activity or other inhibitory activity compared to the organophosphorus bioscavenger not containing the amino acid modification.

[0046] In some embodiments, the organophosphorus bioscavenger in the provided methods and uses and compositions is a cholinesterase. For example, the OP bioscavenger is a cholinesterase that is an acetylcholinesterase or butyrylcholinesterase. The cholinesterase can be a monomer, dimer or a tetramer. In an exemplary embodiment, the organophosphorus bioscavenger is butyrylcholinesterase. For example, the OP bioscavenger is a butyrylcholinesterase that has a sequence of amino acids set forth in SEQ ID NO:236, or is an active portion thereof or is a variant thereof that exhibits at least 85% sequence identity to a sequence of amino acids set forth in SEQ ID NO:236. For example, the butyrylcholinesterase has at least 86%, 87%, 88%, 89%, 90%, 91%, 92%, 93%, 94%, 95%, 96%, 97%, 98% or 99% sequence identity to a sequence of amino acids set forth in SEQ ID NO:236 and exhibits OP binding or inactivating activity. In some examples provided herein, the organophosphorus bioscavenger is a cholinesterase and the active portion is a truncated fragment lacking a tryptophan amphiphilic tetramerization (WAT) domain.

[0047] In some examples of the methods and uses or compositions provided herein, the OP bioscavenger exhibits a half-life of at least 30 hours, 40 hours, 50 hours, 60 hours, 70 hours, 80 hours, 90 hours or 100 hours; or between or about between 30 hours to 130 hours, 40 hours to 100 hours, 40 hours to 80 hours, 40 hours to 60 hours.

[0048] In some examples of the provided methods and uses or compositions, the organophosphorus bioscavenger can be modified with a polymer. For example, the OP bioscavenger can be modified with a polymer that is a polyethylene glycol (PEG). In other examples, the OP bioscavenger can be linked directly or indirectly via a linker to an immunoglobulin, immunoglobulin domain, albumin, transferrin, or transferrin receptor protein. The linker can be a chemical linker or a polypeptide linker, for example, a peptide, polypeptide and an amino acid.

[0049] In the methods and uses or compositions provided herein, the hyaluronan-degrading enzyme can be a hyaluronidase or a chondroitinase, or a variant or a truncated form thereof that exhibits hyaluronan-degrading activity. In some examples, the hyaluronan-degrading enzyme is a hyaluronidase that is active at neutral pH. For example, the hyaluronan-degrading enzyme is a Hyal1, Hyal2, Hyal4 or PH20 hyaluronidase, or a variant or a truncated form thereof that exhibits hyaluronidase activity. In a specific example, the hyaluronan-degrading enzyme is a hyaluronidase that is a PH20 or a variant or a truncated form thereof that exhibits hyaluronidase activity. For example, the hyaluronidase is a PH20 that is a non-human or a human PH20 or variant or a truncated form thereof that exhibits hyaluronidase activity. Such PH20 hyaluronidases include human, monkey, bovine, ovine, rat, mouse or guinea pig PH20, or a variant or a truncated form thereof that exhibits hyaluronidase activity.

[0050] In some examples of the provided methods and uses or compositions, the hyaluronan-degrading enzyme lacks all or a portion of a glycophosphatidylinositol (GPI) anchor or is not membrane-associated when expressed from a cell. For example, the hyaluronan-degrading enzyme contains C-terminal truncations of one or more amino acid residues to remove all or part of a GPI anchor. In a specific example, the hyaluronan-degrading enzyme is a truncated human PH20 that has a sequence of amino acids set forth in SEQ ID NO:1 that contains a C-terminal truncation after amino acid position 465, 466, 467, 468, 469, 470, 471, 472, 473, 474, 475, 476, 477, 478, 479, 480, 481, 482, 483, 484, 485, 486, 487, 488, 489, 490, 491, 492, 493, 494, 495, 496, 497, 498, 499 or 500 of the sequence of amino acids set forth in SEQ ID NO:1, or is a variant thereof that exhibits at least 85% sequence identity to a sequence of amino acids that contains a C-terminal truncation after amino acid position 465, 466, 467, 468, 469, 470, 471, 472, 473, 474, 475, 476, 477, 478, 479, 480, 481, 482, 483, 484, 485, 486, 487, 488, 489, 490, 491, 492, 493, 494, 495, 496, 497, 498, 499 or 500 of the sequence of amino acids set forth in SEQ ID NO:1 and exhibits hyaluronidase activity.

[0051] In other examples of the methods and uses or compositions provided herein, the PH20 has at least 86%, 87%, 88%, 89%, 90%, 91%, 92%, 93%, 94%, 95%, 96%, 97%, 98% or 99% sequence identity to a sequence of amino acids that contains that contains a C-terminal truncation after amino acid position 465, 466, 467, 468, 469, 470, 471, 472, 473, 474, 475, 476, 477, 478, 479, 480, 481, 482, 483, 484, 485, 486, 487, 488, 489, 490, 491, 492, 493, 494, 495, 496, 497, 498, 499 or 500 of the sequence of amino acids set forth in SEQ ID NO:1 and exhibits hyaluronidase activity. In a specific example, the PH20 has a sequence of amino acids that contains at least amino acids 36-464 of SEQ ID NO:1, or has a sequence of amino acids that has at least 85% sequence identity to a sequence of amino acids that contains at least amino acids 36-464 of SEQ ID NO:1 and exhibits hyaluronidase activity. In other examples, the PH20 has at least 86%, 87%, 88%, 89%, 90%, 91%, 92%, 93%, 94%, 95%, 96%, 97%, 98% or 99% sequence identity to a sequence of amino acids that contains at least amino acids 36-464 of SEQ ID NO:1 and exhibits hyaluronidase activity. In one embodiment, the PH20 is truncated at an amino acid corresponding to 477, 478, 479, 480, 481, 482, 483, 484, 485, 486, 487, 488, 489, 490, 491, 492, 494, 494, 495, 496, 497, 498, 499 or 500 of the sequence of amino acids set forth in SEQ ID NO:1 and exhibits hyaluronidase activity.

[0052] In another example of the methods and uses or compositions provided herein, hyaluronan-degrading enzyme in the provided compositions, combinations and containers is a C-terminal truncated PH20 that contains a sequence of amino set forth in any of SEQ ID NOS: 4-9. In some instances, the hyaluronan-degrading enzyme is modified with a polymer, such as a polyethylene glycol (PEG).

### DETAILED DESCRIPTION

[0053] A. Definitions

[0054] B. COMPOSITIONS AND COMBINATIONS OF ORGANOPHOSPHORUS BIOSCAVENGERS AND HYALURONAN-DEGRADING ENZYMES
[0055] 1. Nerve Agent Poisoning
[0056] 2. Treatments for Nerve Agent Poisoning
[0057] 3. Cotherapy with Hyaluronan-Degrading Enzyme

[0058] C. ORGANOPHOSPHORUS BIOSCAVENGERS
[0059] 1. Cholinesterases
   [0060] a. Acetylcholinesterases
   [0061] b. Butyrylcholinesterases
      [0062] rBChE
      [0063] PEG-RBChE
[0064] 2. Other Organophosphorus Bioscavengers
   [0065] a. Aryldialkylphosphatases
      [0066] i. Paraoxonases
      [0067] ii. Organophosphorus hydrolases
      [0068] iii. Parathion hydrolases
   [0069] b. Diisopropyl fluorophosphatases
      [0070] i. Organophosphate acid anhydrolases
[0071] 3. Modified Organophosphorus Bioscavengers
   [0072] a. Polymer modified organophosphorus bioscavengers PEGylated organophosphorus bioscavengers
   [0073] b. Other modifications

[0074] D. HYALURONAN-DEGRADING ENZYMES
[0075] 1. Hyaluronidases
   [0076] a. Mammalian-type hyaluronidases
      [0077] PH20
   [0078] b. Bacterial hyaluronidases
   [0079] c. Hyaluronidases from leeches, other parasites and crustaceans
[0080] 2. Other hyaluronan-degrading enzymes
[0081] 3. Soluble hyaluronan-degrading enzymes
   [0082] a. Soluble Human PH20
   [0083] b. rHuPH20
[0084] 4. Glycosylation of hyaluronan-degrading enzymes
[0085] 5. Modified (Polymer-Conjugated) Hyaluronan-degrading enzymes PEGylated soluble hyaluronan-degrading enzymes

[0086] E. PHARMACEUTICAL COMPOSITIONS AND FORMULATIONS, DOSAGES AND ADMINISTRATION
[0087] 1. Dosages and Administration
   [0088] a. Organophosphorus Bioscavengers
   [0089] b. Hyaluronan-degrading Enzymes
[0090] 2. Injectibles, solutions and emulsions
   [0091] Lyophilized powders
[0092] 3. Topical administration
[0093] 4. Compositions for other routes of administration

[0094] F. METHODS OF PRODUCING NUCLEIC ACIDS ENCODING AN ORGANOPHOSPHORUS BIOSCAVENGER OR HYALURONAN-DEGRADING ENZYME AND POLYPEPTIDES THEREOF
[0095] 1. Vectors and Cells
[0096] 2. Expression
   [0097] a. Prokaryotic Cells
   [0098] b. Yeast Cells
   [0099] c. Insect Cells
   [0100] d. Mammalian Cells
      [0101] i. Generation of Transgenic Animals
   [0102] e. Plants
[0103] 3. Purification Techniques
[0104] 4. PEGylation

[0105] G. METHODS OF ASSESSING ACTIVITY
[0106] Pharmakokinetics and tolerability
[0107] Assays to assess hyaluronan activity
   [0108] a. Assays to assess the activity of a Hyaluronan-degrading Enzyme

[0109] H. THERAPEUTIC USES

[0110] I. COMBINATION THERAPIES

[0111] J. ARTICLES OF MANUFACTURE AND KITS

[0112] K. EXAMPLES

### A. DEFINITIONS

[0113] Unless defined otherwise, all technical and scientific terms used herein have the same meaning as is commonly understood by one of skill in the art to which the invention(s) belong. All patents, patent applications, published applications and publications, GENBANK sequences, websites and other published materials referred to throughout the entire disclosure herein, unless noted otherwise, are incorporated by reference in their entirety. In the event that there is a plurality of definitions for terms herein, those in this section prevail. Where reference is made to a URL or other such identifier or address, it is understood that such identifiers can change and particular information on the internet can come and go, but equivalent information is known and can be readily accessed, such as by searching the internet and/or appropriate databases. Reference thereto evidences the availability and public dissemination of such information.

[0114] As used herein, “organophosphorus poisoning” or “OP poisoning” refers to deleterious or undesirable effects to a living creature exposed to an organophosphorus compound, such as an organophosphorus nerve agent or an organophosphorus pesticide.

[0115] As used herein, “organophosphorus compound,” “organophosphate compound” or “OP compound,” which are used interchangeably herein, refer to chemical compounds that contain a phosphoryl center, and further contain two or three ester linkages. In some aspects, the type of phosphoester bond and/or additional covalent bond at the phosphoryl center classifies an organophosphorus compound. In embodiments wherein the phosphorus is linked to an oxygen by a double bond (PdbdO), the OP compound is known as an “oxon OP compound” or “oxon organophosphorus compound.” In embodiments wherein the phosphorus is linked to a sulfur by a double bond (PdbdS), the OP compound is known as a “thion OP compound” or “thion organophosphorus compound.” Organophosphorus compounds include organophsophorus pesticides and organophosphorus nerve agents.

[0116] As used herein, “organophosphorus pesticide,” “organophosphate pesticide” or “OP pesticide” refers to an organophosphorus compounds that can be used a pesticide or insecticide to destroy pests and insects. An organophosphorus pesticide can be any organophosphorus pesticide, including, but not limited to, acephate, azinphos-methyl, bensulide, cadusafos, chlorethoxyfos, chlorpyrifos, chlorpyrifos methyl, chlorthiophos, coumaphos, dialiflor, diazinon, diehlorvos (DDVP), dierotophos, dimethoate, dioxathion, disulfoton, ethion, ethoprop, ethyl parathion, fenamiphos, fenitrothion, fenthion, fonofos, isazophos methyl, isofenphos, malathion, methamidophos, methidathion, methyl parathion, mevinphos, monocrotophos, naled, oxydemeton methyl, phorate, phosalone, phosmet, phosphamidon, phostebupirim, pirimiphos methyl, profenofos, propetamphos, sulfotepp, sulprofos, temephos, terbufos, tetraehlorvinphos, tribufos (JDEF) and trichlorfon.

[0117] As used herein, “nerve agent” refers to a chemical compound that disrupts the functioning of the nervous system of an organism, such as by inhibiting the actions of the enzyme acetylcholinesterase. Nerve agents are generally prepared by chemical synthesis or extraction from natural sources, and can cause deleterious or undesirable effects to a living creature if inhaled, absorbed, ingested, or otherwise encountered. A nerve agent can be any organophosphorus nerve agent, including, but not limited to G-type nerve agents and V-type nerve agents. Exemplary organophosphorus nerve agents include tabun (GA), sarin (GB), soman (GD), cyclosarin (GF), VX, Russian VX (VR), classified non-traditional nerve agents (NTAs) and diisopropylfluorophosphate (DFP).

[0118] As used herein, “cholinergic toxicity” refers to toxicity achieved by nerve agent inhibition of acetylcholinesterase, accumulation of the neurotransmitter acetylcholine, and concomitant affects on the parasympathetic, sympathetic, motor, and central nervous systems. Cholinergic toxicity can result in myopathy, psychosis, general paralysis and death. Symptoms of exposure include twitching, trembling, hypersecretion, paralyzed breathing, convulsions, and ultimately death. Cholinergic toxicity can be monitored by measuring circulating cholinesterase levels in the plasma. Generally lethality occurs only when cholinesterase activity falls below 20% of normal levels due to binding by nerve agents.

[0119] As used herein, “organophosphorus exposure associated damage” refers to short term (e.g., minutes to, several hours post-exposure) and long term (e.g., one week up to several years post-exposure) damage, for example, due to cholinergic toxicity, to physiological function (e.g., motor and cognitive functions). Organophosphorus exposure associated damage can be manifested by the following clinical symptoms including, but not limited to, headache, diffuse muscle cramping, weakness, excessive secretions, nausea, vomiting and diarrhea. The condition can progress to seizure, coma, paralysis, respiratory failure, delayed neuropathy, muscle weakness, tremor, convulsions, permanent brain dismorphology, social/behavioral deficits and general cholinergic crisis (which can be manifested for instance by exacerbated inflammation and low blood count). Extreme cases can lead to death of the poisoned subjects.

[0120] As used herein, an “organophosphorus bioscavenger” or “organophosphate bioscavenger” or “OP bioscavenger” is an enzyme capable of binding to or hydrolyzing an organophosphorus compound, including organophosphorus pesticides and organophosphorus nerve agents. Organophosphorus bioscavengers include, but are not limited to, cholinesterases, aryldialkylphosphatases, organophosphate hydrolases (OPH), carboxylesterases, triesterases, phosphotriesterases, arylesterases, paraoxonases (PON), organophosphate acid anhydrases and diisopropylfluorophosphatases (DFPases). Organophosphorus bioscavengers can be stoichiometric organophosphorus bioscavengers or catalytic organophosphorus bioscavengers.

[0121] As used herein, a “stoichiometric organophosphorus bioscavenger” or “stoiochiometric OP bioscavenger” refers to an enzyme that binds to an organophosphorus compound in a stiochiometric 1:1 ratio. Stoichiometric OP bioscavengers include, but are not limited, to cholinesterases, such as acetylcholinestases and butyrylcholinesterases.

[0122] As used herein, a “catalytic organophosphorus bioscavenger” or “catalytic OP bioscavenger” refers to an enzyme that hydrolyzes an organophosphorus compound. Catalytic OP bisocavengers include, but are not limited to, aryldialkylphosphatases, organophosphate hydrolases (OPH), carboxylesterases, triesterases, phosphotriesterases, arylesterases, paraoxonases (PON), organophosphate acid anhydrases and diisopropylfluorophosphatases (DFPases).

[0123] As used herein, “organophosphorus inactivating activity” or “OP inactivating activity” refers to the ability of an organophosphorus bioscavenger to inactivate an OP compound. OP bioscavengers can inactivate an OP compound by stoichiometrically binding to the OP compound or by hydrolyzing the OP compound. Hence, inactivating activity can be a function of the binding activity or the hydrolytic activity of the OP bioscavenger to the OP compound. Thus inactivating activity means that the organophosphorous bioscavenger exhibits binding activity and/or hydrolytic activity for an organophosphorous compound. An activity of an organophosphorous compound is inactivated if the activity is reduced in the presence of an OP bioscavenger compared to its absence by at least 20%, 30%, 40%, 50%, 60%, 70%, 80%, 90% or more.

[0124] As used herein, “binding activity” with reference to an OP bioscavenger for an OP compound refers to the ability of the OP bioscavenger to bind to the OP compound. For example, OP bioscavengers covalently bind to OP compound by attack of the active site serine on the phosphorus of the OP compound.

[0125] As used herein, “hydrolytic activity” refers to the ability of an OP bioscavenger to catalyze the hydrolysis of an OP compound. For example, the OP bioscavenger hydrolyzes the organophosphorus compound resulting in its breakdown. Assays to assess hydrolytic or enzymatic activity of OP bioscavengers are described herein.

[0126] As used herein, a “cholinesterase” refers to a family of enzymes involved in nerve impulse transmissions. Cholinesterases catalyze the hydrolysis of acetylcholine at cholinergic synapses. Cholinesterases include but are not limited to acetylcholinesterases and butyrylcholinesterases. Exemplary cholinesterases are acetylcholinesterases and butyrylcholinesterases.

[0127] As used herein, “acetylcholinesterase” or “AChE” refers to enzymes or polypeptides capable of hydrolyzing acetyl esters, including acetylcholine, and whose catalytic activity is inhibited by the chemical inhibitor BW 284C51. Acetylcholinesterases include, but are not limited to, plasma derived or recombinant acetylcholinesterases. Acetylcholinesterases include any of non-human origin including, but not limited to, rat, mouse, cat, chicken, rabbit, cow, pacific electric ray and fruit fly acetylcholinesterases. Exemplary non-human acetylcholinesterase include, acetylcholinesterases from rat (SEQ ID NO:220), mouse (SEQ ID NO:222), cat (SEQ ID NO:228), chicken (SEQ ID NO:226), rabbit (SEQ ID NO:224), cow (bovine; SEQ ID NO:230), pacific electric ray (SEQ ID NO:232) and fruit fly (SEQ ID NO:234). Acetylcholinesterases also include acetylcholinesterase of human origin. Exemplary human acetylcholinesterases include human AChE set forth in SEQ ID NO:215. Acetylcholinesterases can be in any form, including, but not limited to, monomer, dimer and tetramer forms.

[0128] Reference to acetylcholinesterases includes precursor acetylcholinesterases and mature acetylcholinesterases (such as those in which a signal sequence has been removed), truncated forms thereof that have activity, and includes allelic variant and species variants, variants encoded by splice variants, and other variants, including polypeptides that have at least 40%, 45%, 50%, 55%, 65%, 70%, 75%, 80%, 85%, 90%, 95%, 96%, 97%, 98%, 99% or more sequence identity to the polypeptides set forth in SEQ ID NOS: 214-234 and 294-296. Variants exhibit OP inactivating activity. Acetylcholinesterases also include those that contain chemical or posttranslational modifications and those that do not contain chemical or posttranslational modifications. Such modifications include, but are not limited to, PEGylation, albumination, glycosylation, farnesylation, carboxylation, hydroxylation, phosphorylation, and other polypeptide modifications known in the art. A truncated acetylcholinesterase is any C-terminal shortened form thereof, particularly forms that are truncated and have OP inactivating activity.

[0129] As used herein, “butyrylcholinesterase” or “BChE” refers to enzymes or polypeptides capable of hydrolyzing acetylcholine and butyrylcholine, and whose catalytic activity is inhibited by the chemical inhibitor tetraisopropyl-pyrophosphoramide (iso-OMPA). Butyrylcholinesterase include, but are not limited to, plasma derived or recombinant butyrylcholinesterases Butyrylcholinesterases include any of non-human origin including, but not limited to, rat, mouse, cat, horse, chicken, pig, rabbit, cow, sheep, rhesus monkey and Bengal tiger butyrylcholinesterases. Exemplary non-human butyrylcholinesterase include, butyrylcholinesterases from rat (SEQ ID NO:240), mouse (SEQ ID NO:242), cat (SEQ ID NO:244), horse (SEQ ID NO:245), chicken (SEQ ID NO:247), pig (SEQ ID NO:248), rabbit (SEQ ID NO:250), cow (bovine; SEQ ID NO:252), sheep (Ovis aries; SEQ ID NO:253), rhesus monkey (SEQ ID NO:254) and Bengal tiger (SEQ ID NO:256). Butyrylcholinesterases also include butyrylcholinesterases of human origin. Exemplary human butyrylcholinesterases include human BChE set forth in SEQ ID NO:236. Butyrylcholinesterases can be in any form, including, but not limited to, monomer, dimer and tetramer forms. An exemplary recombinant human BChE is rBChE expressed in the milk of transgenic goats.

[0130] Reference to butyrylcholinesterases includes precursor butyrylcholinesterases and mature butyrylcholinesterases (such as those in which a signal sequence has been removed), truncated forms thereof that have activity, and includes allelic variant and species variants, variants encoded by splice variants, and other variants, including polypeptides that have at least 40%, 45%, 50%, 55%, 65%, 70%, 75%, 80%, 85%, 90%, 95%, 96%, 97%, 98%, 99% or more sequence identity to the polypeptides set forth in SEQ ID NOS: 235-256 and 291-293. Variants exhibit OP in activating activity. Butyrylcholinesterases also include those that contain chemical or posttranslational modifications and those that do not contain chemical or posttranslational modifications. Such modifications include, but are not limited to, PEGylation, albumination, glycosylation, farnesylation, carboxylation, hydroxylation, phosphorylation, and other polypeptide modifications known in the art. An exemplary PEGylated form of rBChE is PEG-rBChE (Protexia®) which is expressed in the milk of transgenic goats and further modified by attachment of polyethylene glycol (PEG) polymers. A truncated butyrylcholinesterase is any C-terminal shortened form thereof, particularly forms that are truncated and have OP inactivating activity.

[0131] As used herein, “wild-type” or “native” with reference to OP bioscavengers, such as butyrylcholinesterase, refers to a butyrylcholinesterase polypeptide encoded by a native or naturally occurring butyrylcholinesterase gene, including allelic variants, that is present in an organism, including a plant, in nature.

[0132] As used herein, “aryldialkylphosphatase” refers to naturally occurring or recombinant enzymes that inactivate or hydrolyze organophosphorus compounds. Aryldialkylphosphatases (EC 3.1.8.1) are class of metal-dependent OP-hydrolases that are capable of hydrolyzing a broad range of organophosphorus compounds. Aryldialkylphosphatases require a binuclear metal, such as Zn²⁺, Mn²⁺, Co²⁺ or Cd²⁺, at their active site for enzymatic activity. Aryldialkylphosphatases include, but are not limited to, phosphotriesterases or OP hydrolases (PTE or OPH), paraoxon hydrolases or paraoxonases, parathion hydrolases (PH), OpdA, carboxylesterases, triesterases, phosphotriesterases and arylesterases. Aryldialkylphosphatases include, but are not limited to, organophosphorus hydrolases from Pseudomonas diminuata MG, Flavobacterium sp., Plesiomonas sp. strain M6, Streptomyces lividans and Agrobacterium radiobacter; parathion hydrolases from Burkholderia sp. JBA3, Pseudomonas diminuta MG, Brevundiomonas diminuta, Flavobacterium sp. strain ATCC 27552, and Sulfolobus acidocaldarius; and methyl parathion hydrolases (MPH) from Bacillus subtilis WB800 and Plesiomonas sp. strain M6. Exemplary aryldiakylphosphatases include, but are not limited to, aryldialkylphosphatases set forth in any of SEQ ID NOS:277-285, 297-298 and 300.

[0133] Reference to aryldialkylphosphatases includes truncated forms thereof that have activity, and includes allelic variant and species variants, variants encoded by splice variants, and other variants, including polypeptides that have at least 40%, 45%, 50%, 55%, 65%, 70%, 75%, 80%, 85%, 90%, 95%, 96%, 97%, 98%, 99% or more sequence identity to the polypeptides set forth in SEQ ID NOS: 277-285, 297-298 and 300. Variants exhibit OP inactivating activity.

[0134] As used herein, “paraoxonase” refers to naturally occurring or recombinant enzymes that inactivate or hydrolyze organophosphorus compounds. Paraoxonases include, but are not limited to, native or recombinant paraoxonases. Non-human paraoxonases include, but are not limited to, paraoxonases from rabbit, mouse, rat, pig, cow, chicken, turkey and dog. Exemplary paraoxonases include, but are not limited to, human paraoxonases, including PON1 (SEQ ID NO:258), PON2 (SEQ ID NO:264), and PON3 (SEQ ID NO:271); rabbit paraoxonases, including PON1 (SEQ ID NO:259) and PON3 (SEQ ID NO:274); mouse paraoxonases, including PON1 (SEQ ID NO:260), PON2 (SEQ ID NO:265), and PON3 (SEQ ID NO:272); rat paraoxonases, including PON1 (SEQ ID NO:261), PON2 (SEQ ID NO:270), and PON3 (SEQ ID NO:273); pig paraoxonases, including PON1 (SEQ ID NO:262) and PON3 (SEQ ID NO:276); cow paraoxonases, including PON1 (SEQ ID NO:263), PON2 (SEQ ID NO:269), PON3 (SEQ ID NO:275); chicken PON2 (SEQ ID NO:266); turkey PON2 (SEQ ID NO:267); dog PON2 (SEQ ID NO:268). Paraoxonases also include human paraoxonases, including, but not limited, to PON1 (SEQ ID NO:258), PON2 (SEQ ID NO:264), and PON3 (SEQ ID NO:271). An exemplary human paraoxonase is PON1 set forth in SEQ ID NO:258.

[0135] Reference to paraoxonases includes truncated forms thereof that have activity, and includes allelic variant and species variants, variants encoded by splice variants, and other variants, including polypeptides that have at least 40%, 45%, 50%, 55%, 65%, 70%, 75%, 80%, 85%, 90%, 95%, 96%, 97%, 98%, 99% or more sequence identity to the polypeptides set forth in SEQ ID NOS: 258-276. Variants exhibit OP inactivating activity. Paraoxonases also include those that contain chemical or posttranslational modifications and those that do not contain chemical or posttranslational modifications. Such modifications include, but are not limited to, PEGylation, albumination, glycosylation, farnesylation, carboxylation, hydroxylation, phosphorylation, and other polypeptide modifications known in the art

[0136] As used herein, “diisopropylfluorophosphatase” refers to naturally occurring or recombinant enzymes that inactivate or hydrolyze organophosphorus compounds. Diisopropylfluorophosphatases include, but are not limited to, diisopropylfluorophosphatases from Loligo vulgaris, Alteromonas sp., Pseudoalteromonas haloplanktis, Marinomonas mediterranea, Aplysia californica, Octopus vulgaris and rat senescence marker protein 30; and organophosphate acid anhydrolases from Mycobacterium sp, Amycolatopsis mediterranei, Streptomyces coelicolor, Streptomyces sp AA4, Streptomyces lividans TK24, Streptomyces sviceus and Streptomyces griseoaurantiacus M045. Exemplary diisopropylfluorophosphatases and organophosphate acid anhydrolases include, but are not limited to, diisopropylfluorophosphatases organophosphate acid anhydrolases set forth in any of SEQ ID NOS: 286-290, 299 and 301.

[0137] Reference to diisopropylfluorophosphatases includes truncated forms thereof that have activity, and includes allelic variant and species variants, variants encoded by splice variants, and other variants, including polypeptides that have at least 40%, 45%, 50%, 55%, 65%, 70%, 75%, 80%, 85%, 90%, 95%, 96%, 97%, 98%, 99% or more sequence identity to the polypeptides set forth in SEQ ID NOS: 286-290, 299 and 301. Variants exhibit OP inactivating activity.

[0138] As used herein, “carbamate” refers to any compound that is a carbamate inhibitor of cholinesterase. An exemplary carbamate is pyridostigmine bromide.

[0139] As used herein, “anti-muscarinic” refers to any compound that is a competitive antagonist to muscarinic receptors, including muscarinic acetylcholine receptors. An exemplary anti-muscarininc is atropine.

[0140] As used herein, “cholinesterase reactivator” refers to any compound that releases a bound organophosphorus compound from a cholinesterase. Cholinesterase reactivators include choline-reactivating oximes, including, pyridinium and bispyridinium aldoximes, including, but not limited to, pralidoxime, trimedoxime, obidoxime and HI-6, methoxime and diazepam.

[0141] As used herein, “anti-convulsive” refers to any compound that protects against or reverses seizures.

[0142] As used herein, a “hyaluronan-degrading enzyme” refers to an enzyme that catalyzes the cleavage of a hyaluronan polymer (also referred to as hyaluronic acid or HA) into smaller molecular weight fragments. Exemplary of hyaluronan-degrading enzymes are hyaluronidases, and particular chondroitinases and lyases that have the ability to depolymerize hyaluronan. Exemplary chondroitinases that are hyaluronan-degrading enzymes include, but are not limited to, chondroitin ABC lyase (also known as chondroitinase ABC), chondroitin AC lyase (also known as chondroitin sulfate lyase or chondroitin sulfate eliminase) and chondroitin C lyase. Chondroitin ABC lyase contains two enzymes, chondroitin-sulfate-ABC endolyase (EC 4.2.2.20) and chondroitin-sulfate-ABC exolyase (EC 4.2.2.21). An exemplary chondroitin-sulfate-ABC endolyases and chondroitin-sulfate-ABC exolyases include, but are not limited to, those from Proteus vulgaris and Flavobacterium heparinum (the Proteus vulgaris chondroitin-sulfate-ABC endolyase is set forth in SEQ ID NO:98; Sato et al. (1994) Appl. Microbiol. Biotechnol. 41(1):39-46). Exemplary chondroitin AC lyases from the bacteria include, but are not limited to, those from Flavobacterium heparinum, set forth in SEQ ID NO:99, Victivallis vadensis, set forth in SEQ ID NO:100, and Arthrobacter aurescens (Tkalec et al. (2000) Applied and Environmental Microbiology 66(1):29-35; Ernst et al. (1995) Critical Reviews in Biochemistry and Molecular Biology 30(5):387-444). Exemplary chondroitin C lyases from the bacteria include, but are not limited to, those from Streptococcus and Flavobacterium (Hibi et al. (1989) FEMS-Microbiol-Lett. 48(2):121-4; Michelacci et al. (1976) J. Biol. Chem. 251:1154-8; Tsuda et al. (1999) Eur. J. Biochem. 262:127-133).

[0143] As used herein, “hyaluronidase” refers to a class of hyaluronan-degrading enzymes. Hyaluronidases include bacterial hyaluronidases (EC 4.2.2.1 or EC 4.2.99.1), hyaluronidases from leeches, other parasites, and crustaceans (EC 3.2.1.36), and mammalian-type hyaluronidases (EC 3.2.1.35). Hyaluronidases include any of non-human origin including, but not limited to, murine, canine, feline, leporine, avian, bovine, ovine, porcine, equine, piscine, ranine, bacterial, and any from leeches, other parasites, and crustaceans. Exemplary non-human hyaluronidases include, hyaluronidases from cows (SEQ ID NOS:10, 11, 64 and BH55 (U.S. Pat. Nos. 5,747,027 and 5,827,721), yellow jacket wasp (SEQ ID NOS:12 and 13), honey bee (SEQ ID NO:14), white-face hornet (SEQ ID NO:15), paper wasp (SEQ ID NO:16), mouse (SEQ ID NOS:17-19, 32), pig (SEQ ID NOS:20-21), rat (SEQ ID NOS:22-24, 31), rabbit (SEQ ID NO:25), sheep (SEQ ID NOS:26, 27, 63 and 65), chimpanzee (SEQ ID NO:101), Rhesus monkey (SEQ ID NO:102), orangutan (SEQ ID NO:28), cynomolgus monkey (SEQ ID NO:29), guinea pig (SEQ ID NO:30), Arthrobacter sp. strain FB24 (SEQ ID NO:67), Bdellovibrio bacteriovorus (SEQ ID NO:68), Propionibacterium acnes (SEQ ID NO:69), Streptococcus agalactiae ((SEQ ID NO:70); 18RS21 (SEQ ID NO:71); serotype Ia (SEQ ID NO:72); serotype III (SEQ ID NO:73), Staphylococcus aureus (strain COL (SEQ ID NO:74); strain MRSA252 (SEQ ID NOS:75 and 76); strain MSSA476 (SEQ ID NO:77); strain NCTC 8325 (SEQ ID NO:78); strain bovine RF122 (SEQ ID NOS:79 and 80); strain USA300 (SEQ ID NO:81), Streptococcus pneumoniae ((SEQ ID NO:82); strain ATCC BAA-255/R6 (SEQ ID NO:83); serotype 2, strain D39/NCTC 7466 (SEQ ID NO:84), Streptococcus pyogenes (serotype M1) (SEQ ID NO:85); serotype M2, strain MGAS10270 (SEQ ID NO:86); serotype M4, strain MGAS10750 (SEQ ID NO:87); serotype M6 (SEQ ID NO:88); serotype M12, strain MGAS2096 (SEQ ID NOS:89 and 90); serotype M12, strain MGAS9429 (SEQ ID NO:91); serotype M28 (SEQ ID NO:92); Streptococcus suis (SEQ ID NOS:93-95); Vibrio fischeri (strain ATCC 700601/ES114 (SEQ ID NO:96)), and the Streptomyces hyaluronolyticus hyaluronidase enzyme, which is specific for hyaluronic acid and does not cleave chondroitin or chondroitin sulfate (Ohya, T. and Kaneko, Y. (1970) Biochim. Biophys. Acta 198:607). Hyaluronidases also include those of human origin. Exemplary human hyaluronidases include HYAL1 (SEQ ID NO:36), HYAL2 (SEQ ID NO:37), HYAL3 (SEQ ID NO:38), HYAL4 (SEQ ID NO:39), and PH20 (SEQ ID NO:1). Also included amongst hyaluronidases are soluble hyaluronidases, including, ovine and bovine PH20, soluble human PH20 and soluble rHuPH20. Examples of commercially available bovine or ovine soluble hyaluronidases include Vitrase® (ovine hyaluronidase), Amphadase® (bovine hyaluronidase) and Hydase™ (bovine hyaluronidase).

[0144] As used herein, “purified bovine testicular hyaluronidase” refers to a bovine hyaluronidase purified from bovine testicular extracts (see U.S. Pat. Nos. 2,488,564, 2,488,565, 2,806,815, 2,808,362, 2,676,139, 2,795,529, 5,747,027 and 5,827,721). Examples of commercially available purified bovine testicular hyaluronidases include Amphadase® and Hydase™, and bovine hyaluronidases, including, but not limited to, those available from Sigma Aldrich, Abnova, EMD Chemicals, GenWay Biotech, Inc., Raybiotech, Inc., and Calzyme. Also included are recombinantly produced bovine hyaluronidases, such as but not limited to, those generated by expression of a nucleic acid molecule set forth in any of SEQ ID NOS:190-192.

[0145] As used herein, “purified ovine testicular hyaluronidase” refers to an ovine hyaluronidase purified from ovine testicular extracts (see U.S. Pat. Nos. 2,488,564, 2,488,565 and 2,806,815 and International PCT Application No. WO2005/118799). Examples of commercially available purified ovine testicular extract include Vitrase®, and ovine hyaluronidases, including, but not limited to, those available from Sigma Aldrich, Cell Sciences, EMD Chemicals, GenWay Biotech, Inc., Mybiosource.com and Raybiotech, Inc. Also included are recombinantly produced ovine hyaluronidases, such as, but not limited to, those generated by expression of a nucleic acid molecule set forth in any of SEQ ID NOS:66 and 193-194.

[0146] As used herein, “PH20” refers to a type of hyaluronidase that occurs in sperm and is neutral-active. PH-20 occurs on the sperm surface, and in the lysosome-derived acrosome, where it is bound to the inner acrosomal membrane. PH20 includes those of any origin including, but not limited to, human, chimpanzee, Cynomolgus monkey, Rhesus monkey, murine, bovine, ovine, guinea pig, rabbit and rat origin. Exemplary PH20 polypeptides include those from human (SEQ ID NO:1), chimpanzee (SEQ ID NO:101), Rhesus monkey (SEQ ID NO:102), Cynomolgus monkey (SEQ ID NO:29), cow (e.g., SEQ ID NOS:11 and 64), mouse (SEQ ID NO:32), rat (SEQ ID NO:31), rabbit (SEQ ID NO:25), sheep (SEQ ID NOS:27, 63 and 65) and guinea pig (SEQ ID NO:30).

[0147] Reference to hyaluronan-degrading enzymes includes precursor hyaluronan-degrading enzyme polypeptides and mature hyaluronan-degrading enzyme polypeptides (such as those in which a signal sequence has been removed), truncated forms thereof that have activity, and includes allelic variants and species variants, variants encoded by splice variants, and other variants, including polypeptides that have at least 40%, 45%, 50%, 55%, 65%, 70%, 75%, 80%, 85%, 90%, 95%, 96%, 97%, 98%, 99% or more sequence identity to the precursor polypeptides set forth in SEQ ID NOS: 1 and 10-48, 63-65, 67-102, or the mature forms thereof (lacking the signal sequence). Variants exhibit hyaluronidase activity. For example, reference to hyaluronan-degrading enzyme also includes the human PH20 precursor polypeptide variants set forth in SEQ ID NOS:50-51. Hyaluronan-degrading enzymes also include those that contain chemical or posttranslational modifications and those that do not contain chemical or posttranslational modifications. Such modifications include, but are not limited to, PEGylation, albumination, glycosylation, farnesylation, carboxylation, hydroxylation, phosphorylation, and other polypeptide modifications known in the art. A truncated PH20 hyaluronidase is any C-terminal shortened form thereof, particularly forms that are truncated and neutral active when N-glycosylated.

[0148] As used herein, a “soluble PH20” refers to any form of PH20 that is soluble under physiologic conditions. A soluble PH20 can be identified, for example, by its partitioning into the aqueous phase of a Triton® X-114 solution at 37° C. Wordier et al., (1981) J. Biol. Chem., 256:1604-7). Membrane-anchored PH20, such as lipid-anchored PH20, including GPI-anchored PH20, will partition into the detergent-rich phase, but will partition into the detergent-poor or aqueous phase following treatment with Phospholipase-C. Included among soluble PH20 are membrane-anchored PH20 in which one or more regions associated with anchoring of the PH20 to the membrane has been removed or modified, for example by truncation of C-terminal amino acid residues that for the GPI-anchor attachment signal sequence, where the soluble form retains hyaluronidase activity. Soluble PH20 also include recombinant soluble PH20 and those contained in or purified from natural sources, such as, for example, testes extracts from sheep or cows. Exemplary of such soluble PH20 is soluble human PH20.

[0149] As used herein, soluble human PH20 or sHuPH20 includes PH20 polypeptides lacking all or a portion of the glycosylphosphatidylinositol (GPI) anchor sequence at the C-terminus such that upon expression, the polypeptides are secreted into the medium. The secreted polypeptides are soluble under physiological conditions. Solubility can be assessed by any suitable method that demonstrates solubility under physiologic conditions. Exemplary of such methods is the Triton® X-114 assay, that assesses partitioning into the aqueous phase and that is described above and in the examples. In addition, a soluble human PH20 polypeptide is, if produced in CHO cells, such as CHO—S cells, a polypeptide that is expressed and is secreted into the cell culture medium. Soluble human PH20 polypeptides, however, are not limited to those produced in CHO cells, but can be produced in any cell or by any method, including recombinant expression and polypeptide synthesis. Reference to secretion in CHO cells is definitional. Hence, if a polypeptide could be expressed and secreted in CHO cells and is soluble, i.e. partitions into the aqueous phase when extracted with Triton® X-114, it is a soluble PH20 polypeptide whether or not it is so-produced. The precursor polypeptides for sHuPH20 polypeptides can include a signal sequence, such as a heterologous or non-heterologous (i.e. native) signal sequence. Exemplary of the precursors are those that include a signal sequence, such as the native 35 amino acid signal sequence at amino acid positions 1-35 (see, e.g., amino acids 1-35 of SEQ ID NO:1). It is understood that recombinantly expressed PH20 polypeptides and compositions thereof, including esPH20 and other forms, can include a plurality of species whose C-terminus exhibits heterogeneity. For example, compositions of recombinantly expressed esPH20 produced by expression of the polypeptide of SEQ ID NO:107, which encodes an esPH20 that has amino acids 36-497, can include forms with fewer amino acids, such as 36-496, 36-495.

[0150] As used herein, an “extended soluble PH20” or “esPH20” includes soluble PH20 polypeptides that contain residues up to the GPI anchor-attachment signal sequence and one or more contiguous residues from the GPI-anchor attachment signal sequence such that the esPH20 is soluble under physiological conditions. Solubility under physiological conditions can be determined by any method known to those of skill in the art. For example, it can be assessed by the Triton® X-114 assay described above and in the examples. In addition, as discussed above, a soluble PH20 is, if produced in CHO cells, such as CHO—S cells, a polypeptide that is expressed and is secreted into the cell culture medium. Soluble human PH20 polypeptides, however, are not limited to those produced in CHO cells, but can be produced in any cell or by any method, including recombinant expression and polypeptide synthesis. Reference to secretion in CHO cells is definitional. Hence, if a polypeptide could be expressed and secreted in CHO cells and is soluble, i.e. partitions into the aqueous phase when extracted with Triton® X-114, it is a soluble PH20 polypeptide whether or not it is so-produced. Human soluble esPH20 polypeptides include, in addition to residues 36-490, one or more contiguous amino acids from amino acid residue position 491 of SEQ ID NO:1, inclusive, such that the resulting polypeptide is soluble. Exemplary human esPH20 soluble polypeptides are those that have amino acids residues corresponding to amino acids 36-491, 36-492, 36-493, 36-494, 36-495, 36-496 and 36-497 of SEQ ID NO:1. Exemplary of these are those with an amino acid sequence set forth in any of SEQ ID NOS:151-154 and 185-187. Also included are allelic variants and other variants, such as any with 40%, 45%, 50%, 55%, 65%, 70%, 75%, 80%, 85%, 90%, 91%, 92%, 93%, 94%, 95%, 96%, 97%, 98%, 99% or greater sequence identity with the corresponding polypeptides of SEQ ID NOS:151-154 and 185-187 that retain neutral activity and are soluble. Reference to sequence identity can refer to variants with amino acid substitutions. Reference to “esPH20s” also include those that contain chemical or posttranslational modifications and those that do not contain chemical or posttranslational modifications. Such modifications include, but are not limited to, PEGylation, albumination, glycosylation, farnesylation, carboxylation, hydroxylation, phosphorylation, and other polypeptide modifications known in the art.

[0151] As used herein, “recombinant human PH20 (rHuPH20)” refers to a composition containing soluble form of human PH20 as recombinantly expressed and secreted in Chinese Hamster Ovary (CHO) cells. rHuPH20 is encoded by nucleic acid molecule that includes the signal sequence and is set forth in SEQ ID NO:49. The nucleic acid encoding soluble rHuPH20 is expressed in CHO cells which secrete the mature polypeptide. As produced in the culture medium, there is heterogeneity at the C-terminus so that the product includes a mixture of species that can include any one or more of SEQ ID NO:4 to SEQ ID NO:9 in various abundance.

[0152] As used herein, an “N-linked moiety” refers to an asparagine (N) amino acid residue of a polypeptide that is capable of being glycosylated by post-translational modification of a polypeptide. Exemplary N-linked moieties of human PH20 include amino acids N82, N166, N235, N254, N368 and N393 of human PH20 set forth in SEQ ID NO:1.

[0153] As used herein, an “N-glycosylated polypeptide” refers to a PH20 polypeptide or truncated form thereto containing oligosaccharide linkage of at least three N-linked amino acid residues, for example, N-linked moieties corresponding to amino acid residues N235, N368 and N393 of SEQ ID NO:1. An N-glycosylated polypeptide can include a polypeptide where three, four, five and up to all of the N-linked moieties are linked to an oligosaccharide. The N-linked oligosaccharides can include oligomannose, complex, hybrid or sulfated oligosaccharides, or other oligosaccharides and monosaccharides.

[0154] As used herein, an “N-partially glycosylated polypeptide” refers to a polypeptide that minimally contains an N-acetylglucosamine glycan linked to at least three N-linked moieties. A partially glycosylated polypeptide can include various glycan forms, including monosaccharides, oligosaccharides, and branched sugar forms, including those formed by treatment of a polypeptide with EndoH, EndoF1, EndoF2 and/or EndoF3.

[0155] As used herein, a “deglycosylated PH20 polypeptide” refers to a PH20 polypeptide in which fewer than all possible glycosylation sites are glycosylated. Deglycosylation can be effected, for example, by removing glycosylation, by preventing it, or by modifying the polypeptide to eliminate a glycosylation site. Particular N-glycosylation sites are not required for activity, whereas others are.

[0156] As used herein, a hyaluronidase substrate refers to a substrate (e.g. protein or polysaccharide) that is cleaved and/or depolymerized by a hyaluronidase enzyme. Generally, a hyaluronidase substrate is a glycosaminoglycan. An exemplary hyaluronidase substrate is hyaluronan (HA).

[0157] As used herein, specific activity refers to Units of activity per mg protein. The milligrams of hyaluronidase is defined by the absorption of a solution of at 280 nm assuming a molar extinction coefficient of approximately 1.7, in units of M⁻¹ cm⁻¹.

[0158] As used herein, “activity” refers to a functional activity or activities of a polypeptide or portion thereof associated with a full-length (complete) protein. For example, active fragments of a polypeptide can exhibit an activity of a full-length protein. Functional activities include, but are not limited to, biological activity, catalytic or enzymatic activity, antigenicity (ability to bind or compete with a polypeptide for binding to an anti-polypeptide antibody), immunogenicity, ability to form multimers, and the ability to specifically bind to a receptor or ligand for the polypeptide.

[0159] As used herein, “hyaluronidase activity” or “hyaluronan-degrading activity” refers to the ability to enzymatically catalyze the cleavage of hyaluronic acid. The United States Pharmacopeia (USP) XXII assay for hyaluronidase determines hyaluronidase activity indirectly by measuring the amount of higher molecular weight hyaluronic acid, or hyaluronan, (HA) substrate remaining after the enzyme is allowed to react with the HA for 30 min at 37° C. (USP XXII-NF XVII (1990) 644-645 United States Pharmacopeia Convention, Inc, Rockville, Md.). A Reference Standard solution can be used in an assay to ascertain the relative activity, in units, of any hyaluronidase. In vitro assays to determine the hyaluronidase activity of hyaluronidases, such as PH20, including soluble PH20 and esPH20, are known in the art and described herein. Exemplary assays include the microturbidity assay that measures cleavage of hyaluronic acid by hyaluronidase indirectly by detecting the insoluble precipitate formed when the uncleaved hyaluronic acid binds with serum albumin and the biotinylated-hyaluronic acid assay that measures the cleavage of hyaluronic acid indirectly by detecting the remaining biotinylated-hyaluronic acid non-covalently bound to microtiter plate wells with a streptavidin-horseradish peroxidase conjugate and a chromogenic substrate. Reference Standards can be used, for example, to generate a standard curve to determine the activity in Units of the hyaluronidase being tested.

[0160] As used herein, “neutral active” refers to the ability of a PH20 polypeptide to enzymatically catalyze the cleavage of hyaluronic acid at neutral pH (e.g. at or about pH 7.0). Generally, a neutral active and soluble PH20, e.g., C-terminally truncated or N-partially glycosylated PH20, has or has about at least or 30%, 40%, 50%, 60%, 70%, 80%, 90%, 91%, 92%, 93%, 94%, 95%, 96%, 97%, 98%, 99%, 100%, 110%, 120%, 130%, 140%, 150%, 200%, 300%, 400%, 500%, 1000% or more activity compared to the hyaluronidase activity of a corresponding neutral active PH20 that is not C-terminally truncated or N-partially glycosylated.

[0161] As used herein, a “GPI-anchor attachment signal sequence” is a C-terminal sequence of amino acids that directs addition of a preformed GPI-anchor to the polypeptide within the lumen of the ER. GPI-anchor attachment signal sequences are present in the precursor polypeptides of GPI-anchored polypeptides, such as GPI-anchored PH20 polypeptides. The C-terminal GPI-anchor attachment signal sequence typically contains a predominantly hydrophobic region of 8-20 amino acids, preceded by a hydrophilic spacer region of 8-12 amino acids, immediately downstream of the ω-site, or site of GPI-anchor attachment. GPI-anchor attachment signal sequences can be identified using methods well known in the art. These include, but are not limited to, in silico methods and algorithms (see, e.g. Udenfriend et al. (1995) Methods Enzymol. 250:571-582, Eisenhaber et al., (1999) J. Biol. Chem. 292: 741-758, Fankhauser et al., (2005) Bioinformatics 21:1846-1852, Omaetxebarria et al., (2007) Proteomics 7:1951-1960, Pierleoni et al., (2008) BMC Bioinformatics 9:392), including those that are readily available on bioinformatic websites, such as the ExPASy Proteomics tools site (e.g., the WorldWideWeb site expasy.ch/tools/).

[0162] As used herein, a “polymer” refers to any high molecular weight natural or synthetic moiety that is conjugated to, i.e. stably linked directly or indirectly via a linker, to a polypeptide. Such polymers, typically increase serum half-life, and include, but are not limited to sialic moieties, PEGylation moieties, dextran, and sugar and other moieties, such as for glycosylation. For example, cholinesterases, such as AChE and BChE, and hyaluronidases, such as a soluble PH20 or rHuPH20, can be conjugated to a polymer.

[0163] As used herein, “PEGylated” refers to covalent or other stable attachment of polymeric molecules, such as polyethylene glycol (PEGylation moiety PEG) to proteins, including organophosphorus bioscavengers, such as cholinesterases, and hyaluronan-degrading enzymes, such as hyaluronidases. The addition of a PEGylation moiety can increase serum half-life of the protein.

[0164] As used herein, a “conjugate” refers to a polypeptide linked directly or indirectly to one or more other polypeptides or chemical moieties. Such conjugates include fusion proteins, those produced by chemical conjugates and those produced by any other methods. For example, a conjugate refers to organophosphorus bioscavengers and hyaluronan-degrading enzymes linked directly or indirectly to one or more other polypeptides or chemical moieties, whereby at least one organophosphorus bioscavenger or hyaluronan-degrading enzyme is linked, directly or indirectly to another polypeptide or chemical moiety so long as the conjugate retains hyaluronidase activity.

[0165] As used herein, a “fusion” protein refers to a polypeptide encoded by a nucleic acid sequence containing a coding sequence from one nucleic acid molecule and the coding sequence from another nucleic acid molecule in which the coding sequences are in the same reading frame such that when the fusion construct is transcribed and translated in a host cell, the protein is produced containing the two proteins. The two molecules can be adjacent in the construct or separated by a linker polypeptide that contains, 1, 2, 3, or more, but typically fewer than 10, 9, 8, 7, or 6 amino acids. The protein product encoded by a fusion construct is referred to as a fusion polypeptide.

[0166] As used herein, “half-life” or “half-life of elimination” or “t1/2” refers to the time required for any specified property to decrease by half. For example, half-life refers to the time it takes a substance (e.g. a organophosphorous bioscavenger or a hyaluronan-degrading enzyme) to lose half of its activity or its original level. Hence, half-life can be determined by measuring the activity of a substance in plasma, or it can be determined by measuring the plasma level of the substance in the plasma. For example, half-life can be determined as the time necessary for the drug to be reduced to half of its original level in the body through various bodily processes. The longer the half-life, the longer it will take the substance or drug to be purged from the body. Units for half-life are generally units of time such as hour, minute or day.

[0167] As used herein, “absorption” refers to the movement of a drug into the bloodstream.

[0168] As used herein, “bioavailability” refers to the fraction of an administered dose of drug that reaches the systemic circulation. Bioavailability is a function of the absorption of the drug into the bloodstream.

[0169] As used herein, “dose” refers to the quantity or amount of drug that is administered to a subject for therapeutic or prophylactic purposes.

[0170] As used herein, “nucleic acids” include DNA, RNA and analogs thereof, including peptide nucleic acids (PNA) and mixtures thereof. Nucleic acids can be single or double-stranded. When referring to probes or primers, which are optionally labeled, such as with a detectable label, such as a fluorescent or radiolabel, single-stranded molecules are contemplated. Such molecules are typically of a length such that their target is statistically unique or of low copy number (typically less than 5, generally less than 3) for probing or priming a library. Generally a probe or primer contains at least 14, 16 or 30 contiguous nucleotides of sequence complementary to or identical to a gene of interest. Probes and primers can be 10, 20, 30, 50, 100 or more nucleic acids long.

[0171] As used herein, a peptide refers to a polypeptide that is greater than or equal to 2 amino acids in length, and less than or equal to 40 amino acids in length.

[0172] As used herein, the amino acids which occur in the various sequences of amino acids provided herein are identified according to their known, three-letter or one-letter abbreviations (Table 1). The nucleotides which occur in the various nucleic acid fragments are designated with the standard single-letter designations used routinely in the art.

[0173] As used herein, an “amino acid” is an organic compound containing an amino group and a carboxylic acid group. A polypeptide contains two or more amino acids. For purposes herein, amino acids include the twenty naturally-occurring amino acids, non-natural amino acids and amino acid analogs (i.e., amino acids wherein the α-carbon has a side chain).

[0174] As used herein, “amino acid residue” refers to an amino acid formed upon chemical digestion (hydrolysis) of a polypeptide at its peptide linkages. The amino acid residues described herein are presumed to be in the “L” isomeric form. Residues in the “D” isomeric form, which are so designated, can be substituted for any L-amino acid residue as long as the desired functional property is retained by the polypeptide. NH₂ refers to the free amino group present at the amino terminus of a polypeptide. COOH refers to the free carboxy group present at the carboxyl terminus of a polypeptide. In keeping with standard polypeptide nomenclature described in J. Biol. Chem., 243: 3557-3559 (1968), and adopted 37 C.F.R. §§1.821-1.822, abbreviations for amino acid residues are shown in Table 1:

TABLE 1
Table of Correspondence

SYMBOL

| 1-Letter | 3-Letter | AMINO ACID |
|---|---|---|
| Y | Tyr | Tyrosine |
| G | Gly | Glycine |
| F | Phe | Phenylalanine |
| M | Met | Methionine |
| A | Ala | Alanine |
| S | Ser | Serine |
| I | Ile | Isoleucine |
| L | Leu | Leucine |
| T | Thr | Threonine |
| V | Val | Valine |
| P | Pro | Proline |
| K | Lys | Lysine |
| H | His | Histidine |
| Q | Gln | Glutamine |
| E | Glu | Glutamic acid |
| Z | Glx | Glu and/or Gln |
| W | Trp | Tryptophan |
| R | Arg | Arginine |
| D | Asp | Aspartic acid |
| N | Asn | Asparagine |
| B | Asx | Asn and/or Asp |
| C | Cys | Cysteine |
| X | Xaa | Unknown or other |

[0175] All amino acid residue sequences represented herein by formulae have a left to right orientation in the conventional direction of amino-terminus to carboxyl-terminus. In addition, the phrase “amino acid residue” is defined to include the amino acids listed in the Table of Correspondence (Table 1) and modified and unusual amino acids, such as those referred to in 37 C.F.R. §§1.821-1.822, and incorporated herein by reference. Furthermore, it should be noted that a dash at the beginning or end of an amino acid residue sequence indicates a peptide bond to a further sequence of one or more amino acid residues, to an amino-terminal group such as NH₂ or to a carboxyl-terminal group such as COOH.

[0176] As used herein, the “naturally occurring α-amino acids” are the residues of those 20 α-amino acids found in nature which are incorporated into protein by the specific recognition of the charged tRNA molecule with its cognate mRNA codon in humans. Non-naturally occurring amino acids thus include, for example, amino acids or analogs of amino acids other than the 20 naturally-occurring amino acids and include, but are not limited to, the D-isostereomers of amino acids. Exemplary non-natural amino acids are described herein and are known to those of skill in the art.

[0177] As used herein, a “non-native” amino acid refers to an amino acid not normally located at position or amino acid or amino acid analog has been chemically modified to allow conjugation with a polymer such as polyethylene glycol.

[0178] As used herein, a DNA construct is a single- or double-stranded, linear or circular DNA molecule that contains segments of DNA combined and juxtaposed in a manner not found in nature. DNA constructs exist as a result of human manipulation, and include clones and other copies of manipulated molecules.

[0179] As used herein, a DNA segment is a portion of a larger DNA molecule having specified attributes. For example, a DNA segment encoding a specified polypeptide is a portion of a longer DNA molecule, such as a plasmid or plasmid fragment, which, when read from the 5′ to 3′ direction, encodes the sequence of amino acids of the specified polypeptide.

[0180] As used herein, the term polynucleotide means a single- or double-stranded polymer of deoxyribonucleotides or ribonucleotide bases read from the 5′ to the 3′ end. Polynucleotides include RNA and DNA, and can be isolated from natural sources, synthesized in vitro, or prepared from a combination of natural and synthetic molecules. The length of a polynucleotide molecule is given herein in terms of nucleotides (abbreviated “nt”) or base pairs (abbreviated “bp”). The term nucleotides is used for single- and double-stranded molecules where the context permits. When the term is applied to double-stranded molecules it is used to denote overall length and will be understood to be equivalent to the term base pairs. It will be recognized by those skilled in the art that the two strands of a double-stranded polynucleotide can differ slightly in length and that the ends thereof can be staggered; thus all nucleotides within a double-stranded polynucleotide molecule may not be paired. Such unpaired ends will, in general, not exceed 20 nucleotides in length.

[0181] As used herein, “similarity” between two proteins or nucleic acids refers to the relatedness between the sequence of amino acids of the proteins or the nucleotide sequences of the nucleic acids. Similarity can be based on the degree of identity and/or homology of sequences of residues and the residues contained therein. Methods for assessing the degree of similarity between proteins or nucleic acids are known to those of skill in the art. For example, in one method of assessing sequence similarity, two amino acid or nucleotide sequences are aligned in a manner that yields a maximal level of identity between the sequences. “Identity” refers to the extent to which the amino acid or nucleotide sequences are invariant. Alignment of amino acid sequences, and to some extent nucleotide sequences, also can take into account conservative differences and/or frequent substitutions in amino acids (or nucleotides). Conservative differences are those that preserve the physico-chemical properties of the residues involved. Alignments can be global (alignment of the compared sequences over the entire length of the sequences and including all residues) or local (the alignment of a portion of the sequences that includes only the most similar region or regions).

[0182] “Identity” per se has an art-recognized meaning and can be calculated using published techniques. (See, e.g. Computational Molecular Biology, Lesk, A. M., ed., Oxford University Press, New York, 1988; Biocomputing: Informatics and Genome Projects, Smith, D. W., ed., Academic Press, New York, 1993; Computer Analysis of Sequence Data, Part I, Griffin, A. M., and Griffin, H. G., eds., Humana Press, New Jersey, 1994; Sequence Analysis in Molecular Biology, von Heinje, G., Academic Press, 1987; and Sequence Analysis Primer, Gribskov, M. and Devereux, J., eds., M Stockton Press, New York, 1991). While there exists a number of methods to measure identity between two polynucleotide or polypeptides, the term “identity” is well known to skilled artisans (Carillo, H. & Lipton, D., SIAM J Applied Math 48:1073 (1988)).

[0183] As used herein, homologous (with respect to nucleic acid and/or amino acid sequences) means about greater than or equal to 25% sequence homology, typically greater than or equal to 25%, 40%, 50%, 60%, 70%, 80%, 85%, 90% or 95% sequence homology; the precise percentage can be specified if necessary. For purposes herein the terms “homology” and “identity” are often used interchangeably, unless otherwise indicated. In general, for determination of the percentage homology or identity, sequences are aligned so that the highest order match is obtained (see, e.g.: Computational Molecular Biology, Lesk, A. M., ed., Oxford University Press, New York, 1988; Biocomputing: Informatics and Genome Projects, Smith, D. W., ed., Academic Press, New York, 1993; Computer Analysis of Sequence Data, Part I, Griffin, A. M., and Griffin, H. G., eds., Humana Press, New Jersey, 1994; Sequence Analysis in Molecular Biology, von Heinje, G., Academic Press, 1987; and Sequence Analysis Primer, Gribskov, M. and Devereux, J., eds., M Stockton Press, New York, 1991; Carillo et al. (1988) SIAM J Applied Math 48:1073). By sequence homology, the number of conserved amino acids is determined by standard alignment algorithms programs, and can be used with default gap penalties established by each supplier. Substantially homologous nucleic acid molecules would hybridize typically at moderate stringency or at high stringency all along the length of the nucleic acid of interest. Also contemplated are nucleic acid molecules that contain degenerate codons in place of codons in the hybridizing nucleic acid molecule.

[0184] Whether any two molecules have nucleotide sequences or amino acid sequences that are at least 60%, 70%, 80%, 85%, 90%, 95%, 96%, 97%, 98% or 99% “identical” or “homologous” can be determined using known computer algorithms such as the “FASTA” program, using for example, the default parameters as in Pearson et al. (1988) Proc. Natl. Acad. Sci. USA 85:2444 (other programs include the GCG program package (Devereux, J., et al., Nucleic Acids Research 12(I):387 (1984)), BLASTP, BLASTN, FASTA (Atschul, S. F., et al., J Mol Biol 215:403 (1990)); Guide to Huge Computers, Martin J. Bishop, ed., Academic Press, San Diego, 1994, and Carillo et al. (1988) SIAM J Applied Math 48:1073). For example, the BLAST function of the National Center for Biotechnology Information database can be used to determine identity. Other commercially or publicly available programs include, DNAStar “MegAlign” program (Madison, Wis.) and the University of Wisconsin Genetics Computer Group (UWG) “Gap” program (Madison Wis.). Percent homology or identity of proteins and/or nucleic acid molecules can be determined, for example, by comparing sequence information using a GAP computer program (e.g., Needleman et at (1970) J. Mol. Biol. 48:443, as revised by Smith and Waterman ((1981) Adv. Appl. Math. 2:482). Briefly, the GAP program defines similarity as the number of aligned symbols (i.e., nucleotides or amino acids), which are similar, divided by the total number of symbols in the shorter of the two sequences. Default parameters for the GAP program can include: (1) a unary comparison matrix (containing a value of 1 for identities and 0 for non-identities) and the weighted comparison matrix of Gribskov et al. (1986) Nucl. Acids Res. 14:6745, as described by Schwartz and Dayhoff, eds., ATLAS OF PROTEIN SEQUENCE AND STRUCTURE, National Biomedical Research Foundation, pp. 353-358 (1979); (2) a penalty of 3.0 for each gap and an additional 0.10 penalty for each symbol in each gap; and (3) no penalty for end gaps.

[0185] Therefore, as used herein, the term “identity” or “homology” represents a comparison between a test and a reference polypeptide or polynucleotide. As used herein, the term at least “90% identical to” refers to percent identities from 90 to 99.99 relative to the reference nucleic acid or amino acid sequence of the polypeptide. Identity at a level of 90% or more is indicative of the fact that, assuming for exemplification purposes a test and reference polypeptide length of 100 amino acids are compared. No more than 10% (i.e., 10 out of 100) of the amino acids in the test polypeptide differs from that of the reference polypeptide. Similar comparisons can be made between test and reference polynucleotides. Such differences can be represented as point mutations randomly distributed over the entire length of a polypeptide or they can be clustered in one or more locations of varying length up to the maximum allowable, e.g. 10/100 amino acid difference (approximately 90% identity). Differences are defined as nucleic acid or amino acid substitutions, insertions or deletions. At the level of homologies or identities above about 85-90%, the result should be independent of the program and gap parameters set; such high levels of identity can be assessed readily, often by manual alignment without relying on software.

[0186] As used herein, an aligned sequence refers to the use of homology (similarity and/or identity) to align corresponding positions in a sequence of nucleotides or amino acids. Typically, two or more sequences that are related by 50% or more identity are aligned. An aligned set of sequences refers to 2 or more sequences that are aligned at corresponding positions and can include aligning sequences derived from RNAs, such as ESTs and other cDNAs, aligned with genomic DNA sequence.

[0187] As used herein, “primer” refers to a nucleic acid molecule that can act as a point of initiation of template-directed DNA synthesis under appropriate conditions (e.g., in the presence of four different nucleoside triphosphates and a polymerization agent, such as DNA polymerase, RNA polymerase or reverse transcriptase) in an appropriate buffer and at a suitable temperature. It will be appreciated that certain nucleic acid molecules can serve as a “probe” and as a “primer.” A primer, however, has a 3′ hydroxyl group for extension. A primer can be used in a variety of methods, including, for example, polymerase chain reaction (PCR), reverse-transcriptase (RT)-PCR, RNA PCR, LCR, multiplex PCR, panhandle PCR, capture PCR, expression PCR, 3′ and 5′ RACE, in situ PCR, ligation-mediated PCR and other amplification protocols.

[0188] As used herein, “primer pair” refers to a set of primers that includes a 5′ (upstream) primer that hybridizes with the 5′ end of a sequence to be amplified (e.g. by PCR) and a 3′ (downstream) primer that hybridizes with the complement of the 3′ end of the sequence to be amplified.

[0189] As used herein, “specifically hybridizes” refers to annealing, by complementary base-pairing, of a nucleic acid molecule (e.g. an oligonucleotide) to a target nucleic acid molecule. Those of skill in the art are familiar with in vitro and in vivo parameters that affect specific hybridization, such as length and composition of the particular molecule. Parameters particularly relevant to in vitro hybridization further include annealing and washing temperature, buffer composition and salt concentration. Exemplary washing conditions for removing non-specifically bound nucleic acid molecules at high stringency are 0.1×SSPE, 0.1% SDS, 65° C., and at medium stringency are 0.2×SSPE, 0.1% SDS, 50° C. Equivalent stringency conditions are known in the art. The skilled person can readily adjust these parameters to achieve specific hybridization of a nucleic acid molecule to a target nucleic acid molecule appropriate for a particular application. Complementary, when referring to two nucleotide sequences, means that the two sequences of nucleotides are capable of hybridizing, typically with less than 25%, 15% or 5% mismatches between opposed nucleotides. If necessary, the percentage of complementarity will be specified. Typically the two molecules are selected such that they will hybridize under conditions of high stringency.

[0190] As used herein, substantially identical to a product means sufficiently similar so that the property of interest is sufficiently unchanged so that the substantially identical product can be used in place of the product.

[0191] As used herein, it also is understood that the terms “substantially identical” or “similar” varies with the context as understood by those skilled in the relevant art.

[0192] As used herein, an allelic variant or allelic variation references any of two or more alternative forms of a gene occupying the same chromosomal locus. Allelic variants refer to variations in proteins among members of the same species. Allelic variation arises naturally through mutation, and can result in phenotypic polymorphism within populations. Gene mutations can be silent (no change in the encoded polypeptide) or can encode polypeptides having altered amino acid sequence. The term “allelic variant” also is used herein to denote a protein encoded by an allelic variant of a gene. Typically the reference form of the gene encodes a wildtype form and/or predominant form of a polypeptide from a population or single reference member of a species. Typically, allelic variants, which include variants between and among species typically have at least 80%, 90% or greater amino acid identity with a wildtype and/or predominant form from the same species; the degree of identity depends upon the gene and whether comparison is interspecies or intraspecies. Generally, intraspecies allelic variants have at least about 80%, 85%, 90% or 95% identity or greater with a wildtype and/or predominant form, including 96%, 97%, 98%, 99% or greater identity with a wildtype and/or predominant form of a polypeptide. Reference to an allelic variant herein generally refers to variations n proteins among members of the same species.

[0193] As used herein, “allele,” which is used interchangeably herein with “allelic variant” refers to alternative forms of a gene or portions thereof. Alleles occupy the same locus or position on homologous chromosomes. When a subject has two identical alleles of a gene, the subject is said to be homozygous for that gene or allele. When a subject has two different alleles of a gene, the subject is said to be heterozygous for the gene. Alleles of a specific gene can differ from each other in a single nucleotide or several nucleotides, and can include modifications such as substitutions, deletions and insertions of nucleotides. An allele of a gene also can be a form of a gene containing a mutation.

[0194] As used herein, species variants refer to variants in polypeptides among different species, including different mammalian species, such as mouse and human. For example for PH20, exemplary of species variants provided herein are primate PH20, such as, but not limited to, human, chimpanzee, macaque and cynomologous monkey. Generally, species variants have 70%, 75%, 80%, 85%, 90%, 91%, 92%, 93%, 94%, 95%, 96%, 97%, 98% or more sequence identity. Corresponding residues between and among species variants can be determined by comparing and aligning sequences to maximize the number of matching nucleotides or residues, for example, such that identity between the sequences is equal to or greater than 95%, equal to or greater than 96%, equal to or greater than 97%, equal to or greater than 98% or equal to or greater than 99%. The position of interest is then given the number assigned in the reference nucleic acid molecule. Alignment can be effected manually or by eye, particularly, where sequence identity is greater than 80%.

[0195] As used herein, a human protein is one encoded by a nucleic acid molecule, such as DNA, present in the genome of a human, including all allelic variants and conservative variations thereof. A variant or modification of a protein is a human protein if the modification is based on the wildtype or prominent sequence of a human protein.

[0196] As used herein, a splice variant refers to a variant produced by differential processing of a primary transcript of genomic DNA that results in more than one type of mRNA.

[0197] As used herein, modification is in reference to modification of a sequence of amino acids of a polypeptide or a sequence of nucleotides in a nucleic acid molecule and includes deletions, insertions, and replacements (e.g. substitutions) of amino acids and nucleotides, respectively. Exemplary of modifications are amino acid substitutions. Methods of modifying a polypeptide are routine to those of skill in the art, such as by using recombinant DNA methodologies.

[0198] As used herein, reference to a “modified” or “variant” polypeptide refers to a polypeptide that has one or more amino acid differences compared to a corresponding unmodified or wild-type polypeptide. The one or more amino acid differences can be amino acid mutations such as one or more amino acid replacements (substitutions), insertions or deletions, or can be insertions or deletions of entire domains, and any combinations thereof. A modified or variant polypeptide, such as an amino-acid substituted polypeptide, can exhibit 65%, 70%, 80%, 85%, 90%, 91%, 92%, 93%, 94%, 95%, 96%, 97%, 98% or more sequence identity to a polypeptide not containing the amino acid substitutions. Amino acid substitutions can be conservative or non-conservative. Generally, any modification to a polypeptide retains an activity of the polypeptide. Any modification is contemplated as long as the resulting polypeptide exhibits activity. For example, a variant OP bioscavenger exhibits OP inactivating activity, OP binding activity and/or OP hydrolytic activity. In another example, a variant hyaluronan-degrading enzyme exhibits hyaluronidase activity. The activity that is exhibited by the variant can be at least or about at least 40%, 50%, 60%, 70%, 80%, 90%, 100%, 110%, 120%, 130%, 140%, 150%, 200%, 300%, 400%, 500% or more of the activity of the corresponding polypeptide not containing the modification.

[0199] As used herein, suitable conservative substitutions of amino acids are known to those of skill in this art and can be made generally without altering the biological activity of the resulting molecule. Those of skill in this art recognize that, in general, single amino acid substitutions in non-essential regions of a polypeptide do not substantially alter biological activity (see, e.g., Watson et al. Molecular Biology of the Gene, 4th Edition, 1987, The Benjamin/Cummings Pub. co., p. 224). Such substitutions can be made in accordance with those set forth in TABLE 2 as follows:

TABLE 2

| Original residue | Exemplary conservative substitution |
|---|---|
| Ala (A) | Gly; Ser |
| Arg (R) | Lys |
| Asn (N) | Gln; His |
| Cys (C) | Ser |
| Gln (Q) | Asn |
| Glu (E) | Asp |
| Gly (G) | Ala; Pro |
| His (H) | Asn; Gln |
| Ile (I) | Leu; Val |
| Leu (L) | Ile; Val |
| Lys (K) | Arg; Gln; Glu |
| Met (M) | Leu; Tyr; Ile |
| Phe (F) | Met; Leu; Tyr |
| Ser (S) | Thr |
| Thr (T) | Ser |
| Trp (W) | Tyr |
| Tyr (Y) | Trp; Phe |
| Val (V) | Ile; Leu |

Other substitutions also are permissible and can be determined empirically or in accord with known conservative substitutions.

[0200] As used herein, the term promoter means a portion of a gene containing DNA sequences that provide for the binding of RNA polymerase and initiation of transcription. Promoter sequences are commonly, but not always, found in the 5′ non-coding region of genes.

[0201] As used herein, isolated or purified polypeptide or protein or biologically-active portion thereof is substantially free of cellular material or other contaminating proteins from the cell or tissue from which the protein is derived, or substantially free from chemical precursors or other chemicals when chemically synthesized. Preparations can be determined to be substantially free if they appear free of readily detectable impurities as determined by standard methods of analysis, such as thin layer chromatography (TLC), gel electrophoresis and high performance liquid chromatography (HPLC), used by those of skill in the art to assess such purity, or sufficiently pure such that further purification would not detectably alter the physical and chemical properties, such as enzymatic and biological activities, of the substance. Methods for purification of the compounds to produce substantially chemically pure compounds are known to those of skill in the art. A substantially chemically pure compound, however, can be a mixture of stereoisomers. In such instances, further purification might increase the specific activity of the compound.

[0202] Hence, reference to a substantially purified polypeptide, such as a substantially purified soluble PH20, refers to preparations of proteins that are substantially free of cellular material includes preparations of proteins in which the protein is separated from cellular components of the cells from which it is isolated or recombinantly-produced. In one embodiment, the term substantially free of cellular material includes preparations of enzyme proteins having less that about 30% (by dry weight) of non-enzyme proteins (also referred to herein as a contaminating protein), generally less than about 20% of non-enzyme proteins or 10% of non-enzyme proteins or less that about 5% of non-enzyme proteins. When the enzyme protein is recombinantly produced, it also is substantially free of culture medium, i.e., culture medium represents less than about or at 20%, 10% or 5% of the volume of the enzyme protein preparation.

[0203] As used herein, the term substantially free of chemical precursors or other chemicals includes preparations of enzyme proteins in which the protein is separated from chemical precursors or other chemicals that are involved in the synthesis of the protein. The term includes preparations of enzyme proteins having less than about 30% (by dry weight), 20%, 10%, 5% or less of chemical precursors or non-enzyme chemicals or components.

[0204] As used herein, synthetic, with reference to, for example, a synthetic nucleic acid molecule or a synthetic gene or a synthetic peptide refers to a nucleic acid molecule or polypeptide molecule that is produced by recombinant methods and/or by chemical synthesis methods.

[0205] As used herein, production by recombinant means or using recombinant DNA methods means the use of the well known methods of molecular biology for expressing proteins encoded by cloned DNA.

[0206] As used herein, vector (or plasmid) refers to discrete elements that are used to introduce a heterologous nucleic acid into cells for either expression or replication thereof. The vectors typically remain episomal, but can be designed to effect integration of a gene or portion thereof into a chromosome of the genome. Also contemplated are vectors that are artificial chromosomes, such as yeast artificial chromosomes and mammalian artificial chromosomes. Selection and use of such vehicles are well known to those of skill in the art.

[0207] As used herein, an expression vector includes vectors capable of expressing DNA that is operatively linked with regulatory sequences, such as promoter regions, that are capable of effecting expression of such DNA fragments. Such additional segments can include promoter and terminator sequences, and optionally can include one or more origins of replication, one or more selectable markers, an enhancer, a polyadenylation signal. Expression vectors are generally derived from plasmid or viral DNA, or can contain elements of both. Thus, an expression vector refers to a recombinant DNA or RNA construct, such as a plasmid, a phage, recombinant virus or other vector that, upon introduction into an appropriate host cell, results in expression of the cloned DNA. Appropriate expression vectors are well known to those of skill in the art and include those that are replicable in eukaryotic cells and/or prokaryotic cells and those that remain episomal or those which integrate into the host cell genome.

[0208] As used herein, vector also includes “virus vectors” or “viral vectors.” Viral vectors are engineered viruses that are operatively linked to exogenous genes to transfer (as vehicles or shuttles) the exogenous genes into cells.

[0209] As used herein, “operably” or “operatively linked” when referring to DNA segments means that the segments are arranged so that they function in concert for their intended purposes, e.g., transcription initiates downstream of the promoter and upstream of any transcribed sequences. The promoter is usually the domain to which the transcriptional machinery binds to initiate transcription and proceeds through the coding segment to the terminator.

[0210] As used herein the term “assessing” is intended to include quantitative and qualitative determination in the sense of obtaining an absolute value for the activity of a protein, such as an enzyme, or a domain thereof, present in the sample, and also of obtaining an index, ratio, percentage, visual or other value indicative of the level of the activity. Assessment can be direct or indirect. For example, the chemical species actually detected need not of course be the enzymatically cleaved product itself but can for example be a derivative thereof or some further substance. For example, detection of a cleavage product can be a detectable moiety such as a fluorescent moiety.

[0211] As used herein, biological activity refers to the in vivo activities of a compound or physiological responses that result upon in vivo administration of a compound, composition or other mixture. Biological activity, thus, encompasses therapeutic effects and pharmaceutical activity of such compounds, compositions and mixtures. Biological activities can be observed in in vitro systems designed to test or use such activities. Thus, for purposes herein a biological activity of a hyaluronidase enzyme is its degradation of hyaluronic acid. For purposes herein, a biological activity of an organophosphorus bioscavenger is its binding to, or hydrolyzing, an OP compound.

[0212] As used herein equivalent, when referring to two sequences of nucleic acids, means that the two sequences in question encode the same sequence of amino acids or equivalent proteins. When equivalent is used in referring to two proteins or peptides, it means that the two proteins or peptides have substantially the same amino acid sequence with only amino acid substitutions that do not substantially alter the activity or function of the protein or peptide. When equivalent refers to a property, the property does not need to be present to the same extent (e.g., two peptides can exhibit different rates of the same type of enzymatic activity), but the activities are usually substantially the same.

[0213] As used herein, “modulate” and “modulation” or “alter” refer to a change of an activity of a molecule, such as a protein. Exemplary activities include, but are not limited to, biological activities, such as signal transduction. Modulation can include an increase in the activity (i.e., up-regulation or agonist activity), a decrease in activity (i.e., down-regulation or inhibition) or any other alteration in an activity (such as a change in periodicity, frequency, duration, kinetics or other parameter). Modulation can be context dependent and typically modulation is compared to a designated state, for example, the wildtype protein, the protein in a constitutive state, or the protein as expressed in a designated cell type or condition.

[0214] As used herein, a composition refers to any mixture. It can be a solution, suspension, liquid, powder, paste, aqueous, non-aqueous or any combination thereof. As used herein, a combination refers to any association between or among two or more items. The combination can be two or more separate items, such as two compositions or two collections, can be a mixture thereof, such as a single mixture of the two or more items, or any variation thereof. The elements of a combination are generally functionally associated or related.

[0215] As used herein, “disease or disorder” refers to a pathological condition in an organism resulting from cause or condition including, but not limited to, infections, acquired conditions, genetic conditions, and characterized by identifiable symptoms. Diseases and disorders of interest herein are organophosphorus poisoning, including organophosphorus pesticide poisoning and nerve agent poisoning.

[0216] As used herein, “treating” a subject with a disease or condition means that the subject's symptoms are partially or totally alleviated, or remain static following treatment. Hence treatment encompasses prophylaxis, therapy and/or cure. Prophylaxis refers to prevention of a potential disease and/or a prevention of worsening of symptoms or progression of a disease.

[0217] As used herein, a pharmaceutically effective agent, includes any therapeutic agent or bioactive agents, including, but not limited to, for example, carbamates, anti-muscarinics, cholinesterase reactivators, anti-convulsives, dispersing agents, conventional therapeutic drugs, including small molecule drugs and therapeutic proteins.

[0218] As used herein, treatment means any manner in which the symptoms of a condition, disorder or disease or other indication, are ameliorated or otherwise beneficially altered.

[0219] As used herein, therapeutic effect means an effect resulting from treatment of a subject that alters, typically improves or ameliorates the symptoms of a disease or condition or that cures a disease or condition. A therapeutically effective amount refers to the amount of a composition, molecule or compound which results in a therapeutic effect following administration to a subject.

[0220] As used herein, the term “subject” refers to an animal, including a mammal, such as a human being.

[0221] As used herein, a “subject in need thereof” refers to a human or animal subject who is sensitive to OP toxic effects. Thus, the subject may be exposed or at a risk of exposure to organophosphorus poisoning. Examples include, but are not limited to, civilians contaminated by a terrorist attack at a public event, accidental spills in industry and during transportation, field workers subjected to pesticide or insecticide organophosphorus poisoning, truckers who transport pesticides, pesticide manufacturers, dog groomers who are overexposed to flea dip, pest control workers various domestic and custodial workers who use organophosphorus compounds and military personnel exposed to nerve gases.

[0222] As used herein, a patient refers to a human subject exhibiting symptoms of a disease or disorder.

[0223] As used herein, about the same means within an amount that one of skill in the art would consider to be the same or to be within an acceptable range of error. For example, typically, for pharmaceutical compositions, within at least 1%, 2%, 3%, 4%, 5% or 10% is considered about the same. Such amount can vary depending upon the tolerance for variation in the particular composition by subjects.

[0224] As used herein, dosing regime refers to the amount of agent, for example, the composition containing an organophosphorus bioscavenger, for example, a butyrylcholinesterase or other agent, and a hyaluronan-degrading enzyme, for example a soluble hyaluronidase or other agent, administered, and the frequency of administration. The dosing regime is a function of the disease or condition to be treated, and thus can vary.

[0225] As used herein, frequency of administration refers to the time between successive administrations of treatment. For example, frequency can be hours, days, weeks or months. For example, frequency can be more than once weekly, for example, twice a week, three times a week, four times a week, five times a week, six times a week or daily. Frequency also can be one, two, three or four weeks. The particular frequency is function of the particular disease or condition treated. Generally, frequency is more than once weekly, and generally is twice weekly.

[0226] As used herein, a “cycle of administration” refers to the repeated schedule of the dosing regime of administration of the enzyme and/or a second agent that is repeated over successive administrations.

[0227] As used herein, when referencing dosage based on mg/kg of the subject, an average human subject is considered to have a mass of about 70 kg-75 kg, such as 70 kg.

[0228] As used herein, amelioration of the symptoms of a particular disease or disorder by a treatment, such as by administration of a pharmaceutical composition or other therapeutic, refers to any lessening, whether permanent or temporary, lasting or transient, of the symptoms or, adverse effects of a condition, such as, for example, organophosphorus poisoning.

[0229] As used herein, “ameliorating” or “reducing” a side effect or adverse event, or variations thereof, refers to lessening adverse effects or side effects, whether permanent or temporary, lasting or transient. For purposes herein, ameliorating or reducing includes lessening side effects associated with organophosphorus poisoning.

[0230] As used herein, prevention or prophylaxis refers to reduction in the risk of developing a disease or condition. For purposes herein, prevention means that the compositions and combinations containing OP bioscavengers effect prophylactic protection.

[0231] As used herein, “prophylactic protection” refers to protection against the effects of nerve agent exposure such that cholinergic toxicity of nerve agents is reduced or eliminated. For example, prophylactic protection is achieved when circulating endogenous cholinesterase levels are maintained at a level that is at least 30% of baseline activity after exposure to a nerve agent. Generally, prophylactic protection means that circulating OP bioscavenger agents are present in the plasma at a level that is a least 15 μg/mL, and in particular at a level that is at least 20 μg/mL, 21 μg/mL, 22 μg/mL, 23 μg/mL, 24 μg/mL, 25 μg/mL, 26 μg/mL, 27 μg/mL, 28 μg/mL, 29 μg/mL, 30 μg/mL, 40 μg/mL, 50 μg/mL, 100 μg/mL, 200 μg/mL, 300 μg/mL, 400 μg/mL, 500 μg/mL, 600 μg/mL or more in order to combat the effects of exposure to nerve agents. In particular examples, nerve agent protection is achieved by prophylactic protection within 24 hours of administration of an OP bioscavenger enzyme and for a duration of time of at least 10 days.

[0232] As used herein “baseline activity” refers to a measurable value that represents the normal or beginning level of activity a protein or other substance. Baseline activity can be measured in the plasma isolated from a subject prior to treatment or exposure to any agent or substance. Hence, it represents the normal level. The baseline activity can be used as a corrective measure to normalize levels of exogenously administered drugs or substances.

[0233] As used herein, a “therapeutically effective amount” or a “therapeutically effective dose” refers to the quantity of an agent, compound, material, or composition containing a compound that is at least sufficient to produce a therapeutic effect. Hence, it is the quantity necessary for preventing, curing, ameliorating, arresting or partially arresting a symptom of a disease or disorder.

[0234] As used herein, “percutaneous” administration refers to any medical procedure where access to inner organs or other tissues is effected by passage through the skin, such as by needle puncture of the skin. Percutaneous administration includes, for example, intramuscular injection, subcutaneous injection and intradermal injection.

[0235] As used herein, “intramuscular injection” refers to injection into deep muscle tissue. Typically, injection is given in the buttocks, thigh or the upper arm area. Intramuscular injection can be facilitated by use of a needle that is or is about 1.0 to 1.5 inches in length or longer, and generally more than one inch in length or more. For example, intramuscular injection can be made using a 20 to 22 gauge needle.

[0236] As used herein, “subcutaneous injection” refers to injection given through the epidermis and dermis to reach the subcutaneous fatty (adipose) tissue.

[0237] As used herein, “intradermal injection” refers to injection into the dermal layer of the skin.

[0238] As used herein, unit dose form refers to physically discrete units suitable for human and animal subjects and packaged individually as is known in the art.

[0239] As used herein, a single dosage formulation refers to a formulation as a single dose.

[0240] As used herein, formulation for direct administration means that the composition does not require further dilution for administration.

[0241] As used herein, an “article of manufacture” is a product that is made and sold.

[0242] As used throughout this application, the term is intended to encompass anti-hyaluronan agents, for example hyaluronan-degrading enzyme, such as hyaluronidase, and second agent compositions contained in articles of packaging. For example, a second agent is an OP bioscavenger.

[0243] As used herein, fluid refers to any composition that can flow. Fluids thus encompass compositions that are in the form of semi-solids, pastes, solutions, aqueous mixtures, gels, lotions, creams and other such compositions.

[0244] As used herein a kit refers to a combination of components, such as a combination of the compositions herein and another item for a purpose including, but not limited to, reconstitution, activation, and instruments/devices for delivery, administration, diagnosis, and assessment of a biological activity or property. Kits optionally include instructions for use.

[0245] As used herein, a cellular extract or lysate refers to a preparation or fraction which is made from a lysed or disrupted cell.

[0246] As used herein, animal includes any animal, such as, but are not limited to primates including humans, gorillas and monkeys; rodents, such as mice and rats; fowl, such as chickens; ruminants, such as goats, cows, deer, sheep; pigs and other animals. Non-human animals exclude humans as the contemplated animal. The hyaluronidases provided herein are from any source, animal, plant, prokaryotic and fungal. Most hyaluronidases are of animal origin, including mammalian origin. Generally hyaluronidases are of human origin.

[0247] As used herein, a control refers to a sample that is substantially identical to the test sample, except that it is not treated with a test parameter, or, if it is a plasma sample, it can be from a normal volunteer not affected with the condition of interest. A control also can be an internal control.

[0248] As used herein, the singular forms “a,” “an” and “the” include plural referents unless the context clearly dictates otherwise. Thus, for example, reference to a compound comprising or containing “an extracellular domain” includes compounds with one or a plurality of extracellular domains.

[0249] As used herein, ranges and amounts can be expressed as “about” a particular value or range. About also includes the exact amount. Hence “about 5 bases” means “about 5 bases” and also “5 bases.”

[0250] As used herein, “optional” or “optionally” means that the subsequently described event or circumstance does or does not occur, and that the description includes instances where said event or circumstance occurs and instances where it does not. For example, an optionally substituted group means that the group is unsubstituted or is substituted.

[0251] As used herein, the abbreviations for any protective groups, amino acids and other compounds, are, unless indicated otherwise, in accord with their common usage, recognized abbreviations, or the IUPAC-IUB Commission on Biochemical Nomenclature (see, (1972) Biochem. 11:1726).

### B. COMPOSITIONS AND COMBINATIONS OF ORGANOPHOSPHORUS BIOSCAVENGERS AND HYALURONAN-DEGRADING ENZYMES

[0252] Provided herein are compositions and combinations of an organophosphorus (OP) bioscavenger (such as butyrylcholinesterase) and a hyaluronan-degrading enzyme (such as a hyaluronidase for example a PH20 or truncated form thereof that is active, e.g. rHuPH20). The hyaluronan-degrading enzyme degrades hyaluronan, the extracellular matrix gel-like substance in the skin, and acts as a spreading agent such that co-administration of a composition or combination containing an organophosphorus bioscavenger and a hyaluronidase results in early systemic exposure and increased overall bioavailability of the OP bioscavenger. The formulations, compositions and compositions provided herein can be used as effective therapeutics for the treatment of organophosphorus poisoning, such as poisoning by chemical warfare and pesticide poisoning, without nerve-agent induced impairment and the adverse side effects exhibited by approved therapeutics. Hence, provided herein are methods and uses to prevent, treat or ameliorate nerve agent poisoning by providing a composition or combination of an organophosphorus bioscavenger and hyaluronan-degrading enzyme provided herein.

[0253] 1. Nerve Agent Poisoning

[0254] Nerve agent poisoning by organophosphates and related compounds found in chemical weapons and pesticides remains a constant threat to public safety. For example, three million pesticide poisoning occur each year worldwide, resulting in 220,000 deaths (World Health Organization (1986) Informal Consultation on Planning Strategy for the Prevention of Pesticide Poisoning (WHO, Geneva), WHO/VBC/86.926; World Health Organization (1990) Public Health Impact of Pesticides Used in Agriculture (WHO, Geneva)).

[0255] Organophosphates (OPs) are generally highly lipid soluble and can be absorbed upon exposure by the skin, mucous membranes, gastrointestinal system, and respiratory system. Organophosphates are potent inhibitors of cholinesterases that act by permanently binding to these enzymes. Acetylcholinesterase inhibition causes a buildup of excess neurotransmitters resulting in continued stimulation of muscarinic receptor sites (exocrine glands and smooth muscles) and nicotinic receptor sites (skeletal muscles), and thereby cholinergic toxicity. Organophosphates exert their toxic effects by inhibiting the activity of acetylcholinesterase at nerve endings, leading to the accumulation of the neurotransmitter acetylcholine, and affecting the parasympathetic, sympathetic, motor, and central nervous systems. Thus, exposure to organophosphates causes damage to the peripheral and central nervous systems and results in myopathy, psychosis, general paralysis and death. Symptoms of exposure include twitching, trembling, hypersecretion, paralyzed breathing, convulsions, and ultimately death. When inhaled, signs of organophosphate poisoning can be observed within minutes. When exposure is percutaneous, absorption is slower and later onset and longer duration of symptoms and ailments occurs.

[0256] 2. Treatments for Nerve Agent Poisoning

[0257] Typical treatment of nerve agent poisoning involves intravenous or intramuscular administration of combinations of drugs that serve to antagonize the effects of elevated acetylcholine levels, restore normal acetylcholinesterase activity, and treat symptoms, such a tremors and convulsions. These drugs include carbamates (e.g., pyridostigmine), anti-muscarinics (e.g., atropine), and ChE-reactivators, for example, oximes, such as pralidoxime chloride (pyridinium-2-aldoxime, 2-PAM, Protopam®). Administration of these drugs promotes survival but does not afford complete protection against either nerve agent-induced motor and cognitive defects or neuronal pathology (Lenz et al., (2007) Toxicology 233:31-39). In addition, each of these drugs causes adverse side effects, such as impairment of central nervous system function, dizziness, headaches and increased blood pressure and heart rate (Lenz et al., (2007) Toxicology 233:31-39). Further, the use of oximes to reactivate OP-inhibited acetylcholinesterase is not always effective. For example, the nerve agent Soman (also known as GD) is refractory to reactivation by clinically available oximes (see, e.g., Kassa, J. (2002) J Toxicol Clin Toxicol 40:803-816.) Approximately 10-40% of poisoned patients die, even in developing countries after treatment with “normal” therapeutics (Eyer et al., (2003) Toxicol Rev 22:143-163).

[0258] In recent years, it has been demonstrated that enzymes, such as esterases and cholinesterases, can be used as bioscavengers for organophosphates (see, e.g., Broomfield et al., (1991) J Pharmacol Exp Ther 259:633-638; Castro et al., (1994) Neurotox Teratol 16:145-148; Lenz et al., (2001) Nerve agent bioscavengers: protection against high- and low-dose organophosphorus exposure. In: Somani and Romano (Eds), Chemical Warfare Agents: Toxicity at Low Levels, CRC Press, Boca Raton, pp. 245-260; Lenz et al. (2005) Chem Biol Interact 157:205-210; Cerasoli et al. (2005) Chem Biol Interact 157:363-365; and Huang et al., (2008) BMC Biotechnol 8:50.) Bioscavenger enzymes act by binding to and/or hydrolyzing the organophosphate nerve agent which inhibits its ability to bind to acetylcholinesterase. These proteins are advantageous in that they remain in stable circulation over a long period of time and can be used as a prophylactic therapy, allowing prevention of toxic effects as opposed to treatment of toxic effects.

[0259] One such bioscavenger that has proven successful, although it is constrained by its limited availability, is human butyrylcholinesterase (Broomfield et al., (1991) J Pharmacol Exp Ther 259:633-638). Recently, exogenous administration of recombinantly produced human butyrylcholinesterase (rBChE), including a PEGylated form thereof, has been proven effective for preventing organophosphate poisoning (see, e.g., Huang et al., (2007) Proc Natl Acad Sci USA 101:13603-13608). The PEGylated rBChE has a half-life that is comparable to the human butyrlcholinesterase (in a guinea pig model) of 40-45 hours compared to only 6-7 hours for non-PEGylated rBChE (Huang et al. (2007)). When PEG-rBChE is administered prior to nerve agent exposure in guinea pigs all animals survived with no signs of cholinergic toxicity.

[0260] Although bioscavengers have proven effective as prophylactic therapies for nerve agent poisoning, they do not provide complete therapeutic protection against nerve agent exposure. An effective therapeutic must be able to counteract a broad range of organophosphorus agents, have a quick onset of action, prevent nerve-agent induced motor and cognitive defects, and have limited side effects. Importantly, for successful nerve agent prophylactic protection in humans, a therapeutic should provide prophylactic protection within 24 hours and have a duration of action of at least 10 days. These requirements have not yet been successfully met by any nerve agent bioscavenger.

[0261] 3. Cotherapy with Hyaluronan-Degrading Enzyme

[0262] It is found herein that co-administering (as a combination or composition) an OP bioscavenger with a hyaluronan-degrading enzyme enhances exposure in the circulation to the biotherapeutic agent within 24 hours at levels that provide prophylactic protection. Thus, administering the combinations or compositions provided herein can result in exposure to circulating levels of bioscavenger of at least or about at least 15 μg/mL bioscavenger within 24 hours, such as at least or about at least 20 μg/mL, 21 μg/mL, 22 μg/mL, 23 μg/mL, 24 μg/mL, 25 μg/mL, 26 μg/mL, 27 μg/mL, 28 μg/mL, 29 μg/mL, 30 μg/mL, 40 μg/mL, 50 μg/mL, or more. This means that the OP bioscavenger is available in the blood stream in amounts that can combat the effects of exposure to nerve agents.

[0263] Co-administering an OP bioscavenger with a hyaluronan-degrading enzyme also can result in maintenance of circulating levels of bioscavenger at this level or higher for at least 10 days or more by inclusion in the combinations or compositions an OP bioscavenger that has a long duration of action (e.g. due to PEGylation). For example, in some examples of the combinations and compositions provided herein, the duration of action (e.g. half-life) of the OP bioscavenger is at least 24 hours, such at least 30 hours, 40 hours, 50 hours, 60 hours or more. Hence, the combinations and compositions provided herein result in prophylactic protection sufficient to counteract the effects of exposure to nerve agent poisoning. For example, the combinations and compositions provided herein can provide prophylactic protection within 24 hours and have a duration of action of at least 10 days.

[0264] In particular examples, due to the effect on prophylactic protection afforded by co-administration with a hyaluronan-degrading enzyme, the combinations/compositions provided herein can be administered via percutaneous injection. For example, the combinations/compositions provided herein can be administered by subcutaneous injection, intramuscular injection or intradermal injection. In some examples, the product can be provided separate or together in a vial, syringe or auto-injector device (e.g. a pen), which can permit self-administration. The product can be in lyophilized form or in solution. When in lyophilized form, the vial or syringe or other device can contain a solution that can permit admixture immediately prior to use. This ability to percutaneously administer, by IM or SC injection, the provided formulations of cholinesterase and hyaluronan-degrading enzyme, provides ease of use and portability and thus presents a new approach to counteract nerve agent poisoning.

[0265] For example, as shown herein, pharmacokinetic analysis of plasma levels of an exemplary cholinesterase, PEG-rBChE, when co-administered with a hyaluronan-degrading enzyme (e.g., rHuPH20), reveals that the addition of the hyaluronan-degrading enzyme results in a quicker onset, e.g., shorter time, to the maximum observed concentration of rBChE and additionally results in increased absolute bioavailability (see Example 7 below). That is, the bioavailability of rBChE in the first 24 hours is greatly increased when co-administered with rHuPH20, as compared to rBChE administered alone. For example, in experiments described herein using guinea pigs, co-administration with rHuPH20 was shown to increase early AUC within the first 24 hours by 50% and 81% when administered by intramuscular (IM) or subcutaneous (SC) injection, respectively, and resulted in an absolute bioavailability of bioscavenger that was increased from 73% (IM) and 53% (SC) to 81% and 66%, respectively.

[0266] Further, as shown herein, the co-administration with a hyaluronan-degrading enzyme results in an overall increase in early exposure of the bioscavenger that is greater when the combinations/compositions are administered by IM injection as compared to SC injection. Hence, in particular examples herein, the combinations/compositions provided herein are administered by IM injection. Intramuscular injections can reduce irritations caused by injection into the subcutaneous tissues. Hence, intramuscular injections are generally safe and well tolerated.

[0267] Co-therapy with a hyaluronan-degrading enzyme also has other benefits. For example, the inclusion of a hyaluronan-degrading enzyme in a composition can allow for dose sparing such that less OP bioscavenger can be administered while still achieving prophylactic protection in the circulation. For illustration purposes, dose sparing means that an OP bioscavenger (e.g. PEG-rBChE) that is administered at or about at 100 mg/mL in a volume of 5-7 mL can be administered instead in a volume of 4-6 mL, thereby resulting in administration of a lower total dose of OP bioscavenger. This illustration is not intended to be limiting. It is within the level of one of skill in the art to empirically determine the appropriate or recommended amount of OP bioscavenger to administer and in what appropriate volume depending on the particular bioscavenger enzyme, whether it is intended for prophylactic protection or treatment, and/or the route of administration.

[0268] In other examples, the inclusion of a hyaluronan-degrading enzyme in a combination or composition provided herein can permit higher or greater amounts of OP bioscavenger to be administered in order to afford a higher level nerve agent protection. For example, the higher level of nerve agent protection means that increased or greater circulating bioscavenger is available in the blood stream earlier and/or for longer in order to combat affects from nerve agent exposure. For example, 800 mg to 2000 mg of bioscavenger can be administered, such as 1000 mg to 1400 mg (e.g. of 200 mg/mL formulation). This means that the frequency of dosing with an OP bioscavenger can be less in order to maintain the circulating levels of bioscavenger in the plasma at levels that are at least 15 μg/mL or more, and generally at least 20-30 μg/mL, such as at least 29 μg/mL. In other examples, this means that prophylactic protection can be achieved in less than 24 hours, such as by or within 6 hours to 24 hours, 8 to 18 hours, 12 to 16 hours, such as within 7 hours, 8 hours, 9 hours, 10 hours, 11 hours, 12 hours, 14 hours, 16 hours or 18 hours.

[0269] Any hyaluronan-degrading enzyme, including any truncated or variant thereof form thereof, can be used herein provided the enzyme exhibits hyaluronan-degrading activity. Any suitable bioscavenger, including any variant thereof can be used in the provided formulations, compositions and combinations, provided the bioscavenger binds the organophosphate compound and/o exhibits nerve agent-inactivating activity. For example, the bioscavenger can be a cholinesterase, such as an acetylcholinesterase or butyrylcholinesterase, such as a recombinant butyrylcholinesterase. One or the other or both of the bioscavenger and the hyaluronan-degrading enzyme can be modified by conjugation to a polymer (e.g. PEG) to increase the half-life of the enzyme. Typically, the bioscavenger is modified to increase its half-life, for example, by PEGylation. The increased half-life can increase systemic hyaluronidase and/or cholinesterase activity and sustained duration of action.

[0270] The formulations, compositions and combinations of an organophosphorus bioscavenger and hyaluronan-degrading enzyme provided herein can be provided separately or provided in a single composition. The formulations, compositions and combinations can be provided in vials, syringes or any other suitable container for administration to a subject in need. The hyaluronan-degrading enzyme, such as hyaluronidase, e.g., rHuPH20, can be administered immediately before, immediately after or simultaneously with the organophosphate bioscavenger. The formulations, compositions and combinations can be administered by intravenous bolus (IV), or percutaneously, such as by subcutaneous (SC) or intramuscular (IM) injection. Typically, the formulations, compositions and combinations of an organophosphate bioscavenger and hyaluronan-degrading enzyme provided herein are administered by intramuscular (IM) injection. The formulations, compositions and combinations can be administered in a single dose, or can be administered in multiple doses.

[0271] In the methods provided herein, the formulations, compositions and combinations containing an organophosphorus bioscavenger and hyaluronan-degrading enzyme also can be combined and/or co-formulated with another agent useful for the treatment of organophosphorus poisoning. The second agent can be administered with or separate from the provided formulations, compositions and combinations containing an organophosphorus bioscavenger and hyaluronan-degrading enzyme.

[0272] In order to sustain the therapeutic effect, cycles of administration can be effected. Hence, the formulations, compositions and combinations can be administered successively over a dosing regime in order to maintain a constant level of OP bioscavenger for any desired length of time. The length of time of the cycle of administration depends on the severity of the organophosphorus poisoning, the particular patient, and other considerations within the level of skill of the treating physician. Over the course of treatment, evidence of toxicity can be monitored.

[0273] The following sections describe exemplary formulations, compositions and combinations containing an OP bioscavenger, such as a cholinesterase, and a hyaluronan-degrading enzyme, methods of making them, and using them to treat or prevent organophosphorus poisoning.

### C. ORGANOPHOSPHORUS BIOSCAVENGERS

[0274] Provided herein are compositions and combinations containing an organophosphorus bioscavenger and a hyaluronan-degrading enzyme. The compositions and combinations can be used in methods of treatment and uses for counteracting the effects of poisoning caused by OP compounds and nerve agents, including in prophylactic treatments.

[0275] Organophosphate bioscavangers are proteins that act as biological scavengers for organophosphorus compounds (organophosphates). Organophosphates (OP), including organophosphorus pesticides and nerve agents, are phosphorus-containing organic chemicals that inhibit the action of acetylcholinesterase by binding covalently within the active site of the enzyme where acetylcholine undergoes hydrolysis. Acetylcholinesterase terminates the action of the neurotransmitter acetylcholine at postsynaptic membranes and neuromuscular junctions. Thus, OP compounds prevent the breakdown of acetylcholine leading to a state of constant contraction of muscles. Examples of OP compounds are set forth in Table 3. Other organophosphorus compounds include, but are not limited to, the OP compounds set forth in Section H below. Exemplary OP compounds that have been used as chemical weapons or nerve agents include, for example, O-ethyl-N,N-dimethyl phosphoramidocyanidate (tabun or GA); diisopropyl phosphonofluoridate (sarin or GB); pinacolozymethyl-fluorophosphonate (soman or GD); cyclohexylmethyl phosphonofluoridate (cyclosarin or GF) and ethyl-5-diisopropylaminoethyl methylphosphonothiolate (VX).

[0276] OP bioscavengers are enzyme agents that act to sequester or catalyze toxic OP compounds in circulation before they reach their physiological targets. OP bioscavengers can react with multiple nerve agents so that they are effective against all or mostly all OP nerve agents. Organophosphorus scavengers include enzymes that react specifically, rapidly and irreversibly to organophosphorus compounds. Moreover, bioscavengers typically should have prolonged circulation, be innocuous in the absence of the organophosphorus compound, and be non-antigenic in humans.

[0277] There are at least two types of OP bioscavengers, stoichiometric or catalytic bioscavengers. Stoichiometric organophosphorus bioscavengers act by stoichiometrically binding OPs in a 1:1 mole ratio, thereby both inactivating and sequestering the toxic OP compounds before they can exert effects on the nervous system. Examples of stoichiometric organophosphorus bioscavengers include, for example, cholinesterases and carboxylesterases. Catalytic OP bioscavengers act by catalyzing the hydrolysis, or breakdown, of organophosphorus compounds. Examples of catalytic OP bioscavengers include, for example, hydrolases, anhydrases and paraoxonases.

[0278] In the combinations, compositions and methods provided herein, the organophosphorus bioscavenger can be a stoichiometric bioscavenger or a catalytic bioscavenger. It is understood that any organophosphorus bioscavenger can be used in the compositions, combinations and methods provided herein, including any known in the art (see, e.g., U.S. Pat. Nos. 7,754,461, 7,572,764, 6,642,037; U.S. Pat. Pub. Nos. 201000333221, 20090208480, 20070184045, 20070111279, 20060194301, 20040005681, 20030113902, 20040016005, 20040168208 and 20060253913). For example, the organophosphorus bioscavenger can be an isolated or purified naturally occurring protein, a recombinantly generated protein or a synthetically generated protein. Further, the organophosphorus bioscavenger can be a truncated form of a full-length protein that binds to and sequesters an organophosphorus compound, e.g., OP sequestering activity, or hydrolyses an organophosphorus compound, e.g., OP hydrolytic activity. Hence, organophosphorus bioscavengers provided in the compositions, combinations and methods herein include full-length enzymes or active portions thereof that exhibit OP sequestering and/or hydrolytic activity. The activity generally is at least or at least about or 30%, 40%, 50%, 60%, 70%, 80%, 90% or more of the activity of the corresponding full-length enzyme.

[0279] Exemplary organophosphorus bioscavengers include, but are not limited to, esterases, such as cholinesterases (ChE), including acetylcholinesterase (AChE) and butyrylcholinesterase (BChE), prolidases, such as organophosphate acid anhydrolase (OPAA), phosphotriesterases, such as aryldialkylphosphatases (organophosphorus hydrolases, OPH, OdpA), parathion hydrolases (PH, organophosphorus acid anhydrase), diisopropyl fluorophosphatases (DFPase), and sarinases, and paraoxonases (PON), or any active fragment thereof or any variant thereof that exhibits OP sequestering activity (binds to and sequesters an organophosphorus compound) or hydrolytic activity. The sequences of exemplary organophosphorus bioscavengers are set forth in any of SEQ ID NOS: 214-256 and 258-301. Organophosphorus bioscavengers and the OP compounds they are capable of neutralizing are set forth in Table 3 below.

TABLE 3

| Organophosphorus Bioscavenger | Organophosphorus Compound(s) |
|---|---|
| Acetylcholinesterase | Tabun or GA |
| | Soman or GD |
| | Sarin or GB |
| | VX |
| Butyrlchlinesterase | Tabun or GA |
| | Soman or GD |
| | Sarin or GB |
| | VX |
| | diisopropyl fluorophosphate (DFP) |
| Paraoxonases | Paraoxan |
| | Soman or GD |
| | Sarin or GB |
| | VX |
| | Diazoxon |
| | Chlorpyrifosoxon |
| | Diazonin |
| Organophosphorus hydrolases | Parathion |
| | Soman or GD |
| | Sarin or GB |
| | Cyclosarin or GF |
| | VX |
| | Paraoxan |
| | Diazoxon |
| | Chlorpyrifosoxon |
| | Diazonin |
| | diisopropyl fluorophosphate (DFP) |
| | Coumaphos |
| | Bensulide |
| Parathion hydrolases | Parathion |
| Aryldialkylphosphatases | Sarin or GB |
| | Soman or GD |
| | Cyclosarin or GF |
| | Tabun or GA |
| Diisopropylfluorophosphatases | Sarin or GB |
| | Soman or GD |
| | Cyclosarin or GF |
| | VX |
| | diisopropyl fluorophosphate (DFP) |
| Organophosphate acid anhydrolases | Paraoxan |
| | Tabun or GA |
| | Sarin or GB |
| | Soman or GD |
| | Cyclosarin or GF |
| | diisopropyl fluorophosphate (DFP) |

[0280] Organophosphorus bioscavengers provided herein also include variants of any of the above OP bioscavengers. In some examples, variants include variants of a cholinesterase or a phosphotriesterase. For example, the variants can include allelic or species variants or other variants of OP bioscavengers. For example, an organophosphorus bioscavenger can contain one or more variations in its primary sequence, such as amino acid substitutions, additions and/or deletions. A variant of an OP bioscavenger generally exhibits at least or about at least or 60%, 70%, 80%, 90%, 91%, 92%, 93%, 94%, 95%, 96%, 97%, 98%, 99% or more sequence identity compared to the OP bioscavenger not containing the variation, for example, any OP bioscavenger set forth in any of SEQ ID NOS:214-256 and 258-301. Any variation can be included in the organophosphorus bioscavenger for the purposes herein provided the OP bioscavenger exhibits OP inactivating activity, such as OP sequestering or hydrolytic activity, such as at least or about at least or 5%, 10%, 15%, 20%, 25%, 30%, 35%, 40%, 45%, 50%, 55%, 60%, 65%, 70%, 75%, 80%, 85%, 90%, 95% or more of the OP inactivating activity, such as OP sequestering or hydrolytic activity, of an OP bioscavenger not containing the variation (as measured in vitro and/or in vivo assays well known in the art and described herein).

[0281] Organophosphorus bioscavengers also include those that contain chemical or posttranslational modifications. Such modifications include, but are not limited to, PEGylation, albumination, glycosylation, farnesylation, carboxylation, hydroxylation, phosphorylation, and other polypeptide modifications known in the art. It is understood that such modified forms exhibit OP inactivating activity, such as OP sequestering or hydrolytic activity, such as at least or about at least or 5%, 10%, 15%, 20%, 25%, 30%, 35%, 40%, 45%, 50%, 55%, 60%, 65%, 70%, 75%, 80%, 85%, 90%, 95% or more of the OP inactivating activity, such as OP sequestering or hydrolytic activity, of an OP bioscavenger not containing the modification (as measured in vitro and/or in vivo assays well known in the art and described herein).

[0282] Exemplary of organophosphorus bioscavengers in the compositions, combinations and methods provided herein are butyrylcholinesterases, and modified forms thereof. For example, Protexia® (PharmAthene) is a recombinant version of a PEGylated human butyrylcholinesterase (BChE) produced in transgenic goats, designated PEG-rBChE (see, U.S. Pat. Pub. Nos. 20040016005, 20040168208 and 20060253913, and International Pat. Pub. No. WO2003054182).

[0283] A description is provided below of exemplary OP bioscavengers included in the compositions and combinations provided herein, or for use in the methods provided herein.

[0284] 1. Cholinesterases

[0285] Cholinesterases (ChE) are a family of enzymes involved in nerve impulse transmissions. Cholinesterases are classified into two groups based on substrate preference and sensitivity to selective inhibitors. Acetylcholinesterases (AChE) preferentially hydrolyze acetyl esters such as acetylcholine and are sensitive to the chemical inhibitor BW 284C51. Butyrylcholinesterases (BChE) preferentially hydrolyze other types of esters, such as butyrylcholine, and are sensitive to the chemical inhibitor tetraisopropylpyrophosphoramide (iso-OMPA). OP compounds irreversibly inhibit cholinesterases. Inhibition of cholinesterases by OP compounds occurs through nucleophilic attack of the active serine on the phosphorus atom of the OP compound. This forms a covalent bond between the cholinesterase and the OP compound. Titration of organophosphates both in vitro and in vivo demonstrates a 1:1 stoichiometry between cholinesterases and the cumulative dose of the toxic nerve agent due to the formation of a covalent conjugate of the organophosphorus compound with the ChE active site serine.

[0286] Cholinesterases exist in several different polymeric forms, including monomers, dimers and tetramers. Native human cholinesterases are tetrameric proteins whereas recombinantly produced cholinesterases typically contain a mixture of monomers, dimers and tetramers.

[0287] a. Acetylcholinesterases

[0288] Acetylcholinesterases (EC 3.1.1.7) are type B carboxylesterases that rapidly hydrolyze the neurotransmitter acetylcholine at neuromuscular junctions and braincholinergic synapses. Acetylcholinesterases are also referred to as acetylcholine acetylhydrolases, or true, specific, genuine, erythrocyte, red cell or Type I cholinesterases.

[0289] Human AChE is a globular, tetrameric serine esterase, membrane-bound glycoprotein that is found in erythrocytes, nerve endings, lungs, spleen and the gray matter of the brain. The gene encoding human AChE is located on chromosome 7 and several isoforms or splice variants and naturally occurring genetic variants exist.

[0290] Acetylcholinesterases of this type include, but are not limited to, cholinesterases from rat (SEQ ID NO:220), mouse (SEQ ID NO:222), cat (SEQ ID NO:228), chicken (SEQ ID NO:226), rabbit (SEQ ID NO:224), cow (bovine; SEQ ID NO:230), pacific electric ray (SEQ ID NO:232) and fruit fly (SEQ ID NO:234). Exemplary of acetylcholinesterases used in the compositions, combinations and methods provided herein are human acetylcholinesterases (set forth in SEQ ID NO:215). An acetylcholinesterase set forth in any of SEQ ID NOS: 214-234 and 294-296, active fragments thereof, or variants thereof can be used in the combinations, compositions or methods provided herein. The aceylcholinesterases can be monomers or can be oligomers, or combinations thereof. For example, compositions containing an aceylcholinesterases in the compositions and combinations herein can contain an acetylcholinesterase that is a monomer, dimer, trimer or tetramer, or combinations thereof in various abundance.

[0291] Specifically, the human acetylcholinesterase transcript is normally translated to form a 614 amino acid precursor polypeptide (SEQ ID NO:214) containing a 31 amino acid signal sequence at the N-terminus (amino acid residues 1-31). The mature AChE therefore, is a 583 amino acid polypeptide set forth in SEQ ID NO:215. Human acetylcholinesterase has three N-linked glycans at residues N296, N381 and N495 of SEQ ID NO:214 (corresponding to N265, N350 and N464 or SEQ ID NO:215). Human AChE has eight native cysteines, six of which form three disulfide bonds at residues C100-C127, C288-C303 and C440-0560 of precursor SEQ ID NO:214 (corresponding to C69-C96, C257-C272 and C409-0529 of SEQ ID NO:215). An interchain disulfide bond is formed at residues C611 (corresponding to C580 of SEQ ID NO:215).

[0292] The active site of AChE is found at the bottom of a 20 Å deep cavity that is lined with 14 aromatic residues (see Sussman et al., (1991) Science 253(5022):872-879). The active site catalytic triad, which binds the acyl moiety of the substrate acetylcholine, includes amino acids Ser234, Glu365 and His478 of SEQ ID NO:215 (corresponding to Ser203, Glu334 and His 447 of SEQ ID NO:215).

[0293] Human acetylcholinesterases exist in several molecular forms including at least four isoforms produced by alternative slicing, including Isoform T (AChE-S, synaptic; U.S. Pat. No. 5,595,903); Isoform H (AChE-E, erythrocytic); Isoform R (Ache-R, readthrough; U.S. Pat. No. 6,025,183)); and Isoform 4.

[0294] Also included are variants of any of SEQ ID NOS:214-234 and 294-296 that have at least or about at least or about or 60%, 70%, 80%, 90%, 91%, 92%, 93%, 94%, 95%, 96%, 97%, 98%, 99% or more sequence identity to any of SEQ ID NOS: 214-234 and 294-296. Amino acid variants include variants that contain conservative and non-conservative mutations. It is understood that residues that are important or otherwise required for the activity of a acetylcholinesterase, such as any described above or known to skill in the art, are generally invariant and cannot be changed. These include, for example, active site residues. Thus, for example, amino acid residues 203, 334 and 447 (corresponding to residues in the mature human AChE set forth in SEQ ID NO:215) of a human acetylcholinesterase are generally invariant and are not altered.

[0295] For example, variants of an acetylcholinesterase include allelic variants (SEQ ID NO:294-296), splice variants (U.S. Pat. No. 5,932,780), and post-translational modification variants such as non-glycosylated variants (U.S. Pat. No. 5,284,604),

[0296] Acetylcholinesterases in the combinations and compositions provided herein also can include variants that have an amino acid modification and that exhibits an altered, such as improved, activity compared to an acetylcholinesterase not including the modification. Such variants include those that contain an amino acid modification that enhances the catalytic activity of the acetylcholinesterase. For example, the amino acid modification can be an amino acid replacement (substitution), deletion or insertion. Such modified acetylcholinesterases include any acetylcholinesterase described in the art, including, but not limited to, acetylcholinesterases containing mutations or amino acid replacements at amino acid residues corresponding to R3, P104, G121, G122, Y124, D134, E202, A258, E268, F295, V302, H322, F338, D385, F455 or C580 in the sequence of amino acid set forth in SEQ ID NO:215. The mutation or amino acid replacement can be any replacement to any one of the other 19 amino acids at that position, so long as the variant exhibits acetylcholinesterase activity to inactivate an OP compound. Hence, provided in the compositions and combinations herein are modified or variant acetylcholinesterases containing at least one mutation corresponding to R3Q, P104A, G121H, G122H, Y124H, D134H, E202Q, A258T, E268T, F295H, V302E, H322N, F338D, F338E, F338A, D384G, F455L, C580A, F295H/F338D, F295H/F338E, D134H/E202Q, D134H/F338A with respect to the acetylcholinesterase set forth in SEQ ID NO:215 (see, e.g., U.S. Pat. Nos. 6,001,625; Kucukkilinc et al., (2010) Chem Biol Interact 187:238-240).

[0297] b. Butyrylcholinesterases

[0298] Butyrylcholinesterases (EC 3.1.1.8) are non-specific cholinesterases that hydrolyze various choline esters. Butyrylcholinesterases are also referred to as pseudocholinesterases, or non-specific, plasma, serum, benzoyl, false or Type II cholinesterases. Although its natural substrate is unknown, butyrylcholinesterases are known to hydrolyze acetylcholine and a variety of different choline esters. An addition, butyrylcholinesterases preferentially use butyrylcholine and benzoylcholine as in vitro substrates. Butyrylcholinesterases are reactive towards a wide variety of organophosphorus compounds (see Table 3 above). Butyrylcholinesterases are stoichiometric scavenger in vivo, that is, they form stable stoichiometric (1:1) covalent conjugates between the organophosphorus compound and the active site serine residue.

[0299] Human BChE is a globular, tetrameric serine esterase with a molecular mass of approximately 340 kDa. BChE in human serum has a concentration of 5 mg/L and a half-life of 12 days (Ostergaard et al., (1988) Acta Anaesthesiol Scand 32:266-269). BChE is synthesized in the liver and is present in mammalian blood plasma, liver, pancreas, intestinal mucosa, the white matter of the central nervous system, smooth muscle and heart. The gene encoding human BChE is located on chromosome 3. Exemplary of butyrylcholinesterases used in the compositions, combinations and methods provided herein are human butyrylcholinesterases (set forth in SEQ ID NO:236). Species variants of butyrylcholinesterases type include, but are not limited to cholinesterases from rat (SEQ ID NO:240), mouse (SEQ ID NO:242), cat (SEQ ID NO:244), horse (SEQ ID NO:245), chicken (SEQ ID NO:247), pig (SEQ ID NO:248), rabbit (SEQ ID NO:250), cow (bovine; SEQ ID NO:252), sheep (Ovis aries; SEQ ID NO:253), rhesus monkey (SEQ ID NO:254) and Bengal tiger (SEQ ID NO:256). A butyrylcholinesterase set forth in any of SEQ ID NOS: 235-257 and 291-293, active fragments thereof, or variants thereof can be used in the combinations, compositions or methods provided herein. The butyrylcholinesteras can be monomers or can be oligomers, or combinations thereof. For example, compositions containing an butyrylcholinesterase in the compositions and combinations herein can contain an butyrylcholinesterase that is a monomer, dimer, trimer or other higher ordered oligomer, or combinations thereof in various abundance.

[0300] The human butyrylcholinestase transcript is normally translated to form a 602 amino acid precursor polypeptide (SEQ ID NO:235) containing a 28 amino acid signal sequence at the N-terminus (amino acid residues 1-28). The mature BChE therefore, is a 574 amino acid polypeptide set forth in SEQ ID NO:236. Structural analysis reveals BChE is a tetrameric glycoprotein containing four identical subunits, each containing 574 amino acids and nine N-linked glycans and having a molecular weight of 85 kDa. (Lockridge et al., (1987) J Biol Chem 262:549-557). The nine N-linked glycans in human BChE are at residues N45, N85, N134, N269, N284, N369, N483, N509, N513 and N514 of SEQ ID NO:235 (corresponding to amino acids N17, N57, N106, N241, N256, N341, N455, N481, N485 and N486 of SEQ ID NO:236). Human butyrylcholinesterase has eight native cysteines, six of which form three disulfide bonds, at residues C93-C120, C280-C291 and C428-0547 of precursor SEQ ID NO:235 (corresponding to C65-C92, C252-C263 and C400-0519 of SEQ ID NO:236). In addition, an interchain disulfide bond is formed at residue C599 of SEQ ID NO:235 (corresponding to C571 of SEQ ID NO:236). The C-terminus of human BChE (amino acid residues 559-602 of SEQ ID NO:235 corresponding to amino acid residues 531-574 of SEQ ID NO:236) is rich in aromatic amino acids that cause aggregation and is referred to as the tetramerization or aggregation domain. C-terminal amino acids 525-574 of SEQ ID NO:236 are not necessary for BChE biological activity (Blong et al., (1997) Biochem J 327:747-757)

[0301] The active site catalytic triad includes residues Ser226, Glu353 and His466 of precursor set forth in SEQ ID NO:235 (corresponding to Ser198, Glu325 and His438 of SEQ ID NO:236). The acyl binding pocket of BChE is lined with aliphatic residues (see, Nicolet et al., (2003) J Biol Chem 278:41141-41147).

[0302] Also included in the compositions, combinations or methods provided herein are variants of any of SEQ ID NOS:235-257 and 291-293 that have at least or about at least or about or 60%, 70%, 80%, 90%, 91%, 92%, 93%, 94%, 95%, 96%, 97%, 98%, 99% or more sequence identity to any of SEQ ID NOS: 235-257 and 291-293. Amino acid variants include variants that contain conservative and non-conservative mutations. It is understood that residues that are important or otherwise required for the activity of a butyrylcholinesterase, such as any described above or known to skill in the art, are generally invariant and cannot be changed. These include, for example, active site residues. Thus, for example, amino acid residues 198, 325 and 438 (corresponding to residues in the mature human BChE set forth in SEQ ID NO:236) of a human butyrylcholinesterase are generally invariant and are not altered.

[0303] For example, there are at least four predominant allelic forms of human BChE, including Eu (wildtype), Ea (A, atypical, containing the mutation D70G in SEQ ID NO:236 (McGuire et al., (1989) Proc Natl Acad Sci USA 86:953-957)), Ef and Es and over 30 naturally occurring genetic variants and more than eleven isoenzyme variants are known. Additional natural variants include the J variant containing the mutation E497V (Bartels et al. (1992) Am J Hum Genet. 50:1104-1114); K variant containing the mutation A539T (Bartels et al., (1992) Am J Hum Genet 50:1086-1103); and H variant containing the mutation V142M (all in the sequence of amino acids set forth in SEQ ID NO:236).

[0304] Butyrylcholinesterases in the combinations or compositions provided herein also can include variants that have an amino acid modification and that exhibits an altered, such as improved, activity compared to an butyrylcholinesterase not including the modification. Such variants include those that contain an at least one amino acid modification that enhances the catalytic activity of the butyrylcholinesterase. Such modified butyrylcholinesterases include any butyrylcholinesterase described in the art, including, but not limited to, butyrylcholinesterases containing mutations or amino acid replacements at amino acid residues corresponding to D70, W82, W112, G115, G116, G117, Q119, T120, Y128, E197, S198, A199, S224, F227, W231, A277, P285, L286, S287, V288, G291, E325, A328, F329, V331, Y332, C400, Y419, W430, H438, G439, Y440 and E441 in the sequence of amino acid set forth in SEQ ID NO:236. The mutation or amino acid replacement can be any replacement to any one of the other 19 amino acids at that position, so long as the variant exhibits butyrylcholinesterase activity to inactivate an OP compound. For example, modified butyrylcholinesterases that can be included in the combinations or compositions provided herein include any containing at least one mutation corresponding to D70N, G115A, G116F, G116W, G116H, G116S, G117H, G117K, G117C, G117N, Q119Y, Q119H, Q119E, Q119D, T120F, E197Q, E197D, E197G, A199S, S224Y, F227A, F227G, F227P, F227T, F227S, F227C, F227M, F2271, F227L, F227V, A277D, A277E, P285Q, P285S, P285A, P285G, P285I, P285K, L286A, L286H, L286W, L286M, S287G, V288F, V288H, V288W, V288E, G291E, G291D, A328F, A328Y, A328G, A328H, A3281, A328W, F329A, F329D, F329S, V331L, Y332A, Y332S, Y332F, Y332M, Y332G, Y332P, C400S, Y419S, G439A, G439L, E441D. The variant or modified butyrylcholinesterases can include those with more than one mutation such as any having amino acid replacements corresponding to G117H/Q119E, G117H/E197Q, Q119H/V288E, Q119DN288H, Q119EN288H, F227A/A328W, L286H/F329D, F288H/G291E, F288H/G291D, V288H/A277D, V288H/A277E, A328W/F227A, A328WN331L, A328W/Y332M, A328W/Y332P, A328W/Y332S, A328W/Y332A, A328W/Y332G, N68Y/Q119Y/A277W, Q119YN288F/A328Y, A199S/S287G/A328W, A199S/A328W/Y332G, F227A/S287G/A328W, A328W/Y332A/Y419S, A199S/F227A/A328W/Y332G, A199S/S287G/A328W/Y332G, A199S/F227A/S287G/A328W, F227A/S287G/A328W/Y332M, A199S/F227A/S287G/A328W/Y332G, A199S/F227A/S287G/A328W/Y332M, A199S/F227A/S287G/A328W/E441D, A199S/F227A/P285A/S287G/A328W/Y332G, A199S/F227A/P285S/S287G/A328W/Y332G, A199S/F227A/P285Q/S287G/A328W/Y332G, A199S/F228P/S287G/A328W/Y332G, A199S/F227A/P285G/S287G/A328W/Y332G, A199S/F227A/L286M/S287G/A328W/Y332G, A199S/P285Q/S287G/A328W/Y332G, A199S/SP2851/287G/A328W/Y332G, A199S/F227G/S287G/A328W/Y332G, A199S/P285S/S287G/A328W/Y332G, A199S/F227V/S287G/A328W/Y332G, A199S/P285G/S287G/A328W/Y332G, A199S/F227I/S287G/A328W/Y332G, A199S/F227L/S287G/A328W/Y332G, A199S/L286M/S287G/A328W/Y332G, and A199S/F227A/P285K/S287G/A328W/Y332G in SEQ ID NO:236 (see, e.g., U.S. Pat. Nos. 6,001,625, 7,049,121, 7,070,973, 7,892,537 and 7,919,082; U.S. Pat. Pub. No. 2009/0249503; and Xie et al., (1999) Molecular Pharmacology 55:83-91, Vyas et al., (2010) Chem Biol Interact 187:241-245). Additional variants include those with at least one amino acid mutation in one or more regions corresponding to amino acid positions 62-82, 110-121, 194-201, 224-234, 277-289, 327-332, and/or 429-442 of SEQ ID NO:236 (U.S. Pat. No. 7,070,973).

[0305] In some instances in the combinations and compositions provided herein, a human butyrylcholinesterase can be truncated to remove all or part of the C-terminus. Such truncation can remove all or part of the aggregation domain. For example, a human butyrylcholinesterase provided herein can be C-terminally truncated by 1, 2, 3, 4, 5, 6, 7, 8, 9, 10, 15, 20, 25, 30, 40, 50, 60 or more amino acids compared to the wild type butyrylcholinesterase, for example a butyrylcholinesterase set forth in SEQ ID NO:236, provided that the C-terminally truncated butyrylcholinesterase exhibits OP inactivating activity, such as OP sequestering and/or hydrolytic activity. In some instances, a butyrylcholinestase provided herein is truncated after amino acid residue 524 of SEQ ID NO:236. In other examples, a butyrylcholinestase provided herein is truncated after amino acid residue 530 of SEQ ID NO:236.

[0306] rBChE

[0307] Any of the above butyrylcholinesterases can be produced recombinantly. Methods of recombinant DNA techniques are well-known to one of skill in the art. For example, a butyrylcholinesterase, active portion thereof or variant thereof can be produced recombinantly by expression of an encoding nucleic acid in mammalian cells, for example CHO cells. In other examples, a butyrylcholinesterase, active portion thereof or variant thereof also can be produced in other expression systems such as by expression in transgenic animals or plants.

[0308] For example, a butyrylcholinesterase set forth in SEQ ID NO:236 (and encoded by a sequence of nucleic acids set forth in SEQ ID NO:257) has been expressed recombinantly from CHO cells. The crystal structure of full-length monomeric recombinant human butyrylcholinesterase produced in CHO cells has been determined (see Ngamelue et al., (2007) Acta Crsytallogr Sect F Structu Biol Cryst Commun 63(Pt 9):723-727). When expressed in CHO cells, recombinant BChE is recovered as a mixture of oligomeric forms, including 15-40% monomers, 50-55% dimers and 10-30% tetramers. Recombinant BChE has also been expressed in E. coli (Masson P. (1992) in Multidisciplinary Approaches to Cholinesterase Functions, eds Shafferman A, Velan B (Plenum, New York) pp 49-52), microinjected Xenopus laevis oocytes; insect cell lines in vitro and larvae in vivo; silkworm Bombyx mori; and mammalian COS cells, 293T cells (Altamarino and Lockridge (1999) Chem Biol Interact 119-120:53-60) and CHO cells (Millard et al (1995) Biochemistry 34:15925-15933).

[0309] In addition, human butyrylcholinesterases have been expressed in transgenic mammals, including, but not limited to, mice and goats (see, Huang et al., (2007) Proc Natl Acad Sci USA 104:13603-13608; and U.S. Pat. Pub. Nos. 20040016005 20060253913). Protexia® is a recombinant human butyrylcholinesterase (rBChE) expressed in the milk of transgenic goats (see, Huang et al., (2007) Proc Natl Acad Sci USA 104:13603-13608 and U.S. Pat. Pub. Nos. 20040016005 and 20040168208; and International Pat. Pub. No. WO2003054182). rBChE can be expressed in transgenic goats under the control of a goat β-casein promoter (set forth in SEQ ID NO:195) and can be produced in concentrations of up to 5 g/L of milk. Transgenic recombinant BChE secreted in goat's milk is about 80% dimers and 20% monomers. rBChE produced in this manner is underglycosylated, having more fucose and GalNac and less mannose, galactose, GlcNac and sialic acid. rBChE is expressed mainly in dimeric form, with a half life in human serum of approximately 6.5 hours, if administered intravenously, and 7.1 hours if administered by intramuscular injection.

[0310] PEG-rBChE

[0311] Any of the above butyrylcholinesterases also can be further modified to increase half-life. This is further described in subsection 3. For example, PEG-rBChE is a known therapeutic agent and contains a sequence of amino acid thiols conjugated to PEG moieties. Each monomeric subunit is conjugated to a single PEG moiety. When PEGylated (see Section 3 below), PEG-rBChE has a half life of 44.2 and 40.7 hours when administered intravenously or by intramuscular injection, respectively. In addition, rBChE was shown to bind to nerve agents soman (GD), sarin (GB), tabun (GX) and VX in a 1:1 molar ratio as demonstrated by in vitro inhibition assays. PEG-rBChE purified from the milk of transgenic goats had a specific activity of approximately 700 U/mg (as measured by the Ellman assay). Non-denaturing PAGE gels stained for activity with butyryl-thiocholine revealed that PEG-rBChE secreted in the milk of transgenic goats contains a mixture of monomer, dimer and tetramer species with dimer being the predominant form. The mixture of these forms was either assembled into tetramers in vitro (approximately 60-70% tetramer content) using poly-proline or subjected to PEGylation using standard techniques (see U.S. Pat. Pub. No. 20090208480).

[0312] 2. Other Organophosphorus Bioscavengers

[0313] Additional organophosphorus bioscavengers that bind to or hydrolyze organophosphorus compounds can be used in the provided compositions, combinations and methods. For example, aryldialkylphosphatases, such as paraoxonases, organophosphorus hydrolases, and parathion hydrolases, and diisopropyl fluorophosphatases, including organophosphate acid anhydrolases, that either bind to, or hydrolyze, organophosphorus compounds can be employed in the compositions, combinations and methods provided herein.

[0314] a. Aryldialkylphosphatases

[0315] Aryldialkylphosphatases (EC 3.1.8.1) are class of metal-dependent OP-hydrolases that are capable of hydrolyzing a broad range of organophosphorus compounds, including sarins and insecticidal organophosphates (Bird et al. (2008) Toxicology 21:8-92). Aryldialkylphosphatases require a binuclear metal, such as Zn²⁺, Mn²⁺, Co²⁺ or Cd²⁺, at their active site for enzymatic activity. Aryldialkylphosphatases include phosphotriesterases or OP hydrolases (PTE or OPH), paraoxon hydrolases or paraoxonases, parathion hydrolases (PH), and OpdA.

[0316] i. Paraoxonases

[0317] Serum paraoxonases (PON, EC 3.1.1.2; EC 3.1.8.1) are high-density lipoprotein (HDL)-associated esterases that hydrolyze toxic metabolites of organophosphorus insecticides, pesticides and nerve agents (see, U.S. Pat. Nos. 7,026,140 and 7,211,387). For example, paraoxonases are known to hydrolyze soman and sarin (Gan et al., (1991) Drug Metab Dispos 19:100-106). PON enzymes possess a conserved, hydrophobic leader sequence at their N-terminus of about or approximately 20 amino acids, which is not excised and is part of the mature protein. The leader sequence is directly involved in th bidning of PONS to high density lipoproteins (HDL).

[0318] Human serum paraoxonase (HuPON1) is synthesized in the liver and secreted into the bloodstream where it is found bound to high-density lipoprotein in the circulation (Primo-Parmo et al., (1996) Genomics 33:498-507; Shih et al., (1998) Nature 394:284-287). HuPON1 hydrolyzes multiple classes of substrates, including aryl esters (including phenyl acetate), lactones, and organophosphorus compounds including paraoxon, diazoxon (DZO), and chlorpyrifosoxon and the chemical warfare agents sarin, soman and VX (Gan et al., (1991) Drug Metabl Dispos 19:100-106; Costa et al., (199) Chem Biol Interact 119-120:429-438; Davies et al., (1996) Nat Genet. 14:334-336; Broomfield et al., (1991) J Pharmacol Exp Ther 259:633-638, Yeung et al., (2005) FEBS J 272:2225-2230; Stevens et al., (2008) Proc Natl Acad Sci USA 105:12780-12784).

[0319] Paraoxonases of this type include, but are not limited to, human paraoxonases, including PON1 (SEQ ID NO:258), PON2 (SEQ ID NO:264), and PON3 (SEQ ID NO:271); rabbit paraoxonases, including PON1 (SEQ ID NO:259) and PON3 (SEQ ID NO:274); mouse paraoxonases, including PON1 (SEQ ID NO:260), PON2 (SEQ ID NO:265), and PON3 (SEQ ID NO:272); rat paraoxonases, including PON1 (SEQ ID NO:261), PON2 (SEQ ID NO:270), and PON3 (SEQ ID NO:273); pig paraoxonases, including PON1 (SEQ ID NO:262) and PON3 (SEQ ID NO:276); cow paraoxonases, including PON1 (SEQ ID NO:263), PON2 (SEQ ID NO:269), PON3 (SEQ ID NO:275); chicken PON2 (SEQ ID NO:266); turkey PON2 (SEQ ID NO:267); dog PON2 (SEQ ID NO:268). Exemplary of paraoxonases used in the combinations, compositions and methods provided herein is human paraoxonase 1 (set forth in SEQ ID NO:258). A paraoxonase set forth in any of SEQ ID NOS:258-276, active fragments thereof, or variants thereof can be used in the combinations, compositions or methods provided herein.

[0320] Specifically, human serum paraoxonase 1 is a 43-45 kDa glycosylated protein containing 354 amino acids (PON1, SEQ ID NO:258). Five PON1 promoter region polymorphisms and two PON1 coding region polymorphisms (including PON1-55) have been identified (Costa et al. (2003) Annu Rev Med 54:371-392).

[0321] Also included in the compositions, combinations or methods provided herein are variants of any of SEQ ID NOS:258-276 that have at least or about at least or about or 60%, 70%, 80%, 90%, 91%, 92%, 93%, 94%, 95%, 96%, 97%, 98%, 99% or more sequence identity to any of SEQ ID NOS: 258-276. Amino acid variants include variants that contain conservative and non-conservative mutations. It is understood that residues that are important or otherwise required for the activity of a paraoxonase, such as any described above or known to skill in the art, are generally invariant and cannot be changed.

[0322] Paraoxonases in the combinations and compositions provided herein also can include variants that have an amino acid modification and that exhibits an altered, such as improved, activity compared to a paraoxonase not including the modification. Such variants include those that contain an amino acid modification that enhances the catalytic activity of the paraoxonase. For example, the amino acid modification can be an amino acid replacement (substitution), deletion or insertion. Hence, provided in the compositions and combinations herein are modified or variant paraoxonases containing at least one mutation corresponding to A6E, L10S, L14M, L28Y, N41D, E49N, L55M, L69G, L69I, L69V, L69A, L69S, L69M, K70A, K70S, K70Q, K70N, Y71F, Y71C, Y71A, Y71L, Y71I, V97A, 1102V, H115W, H115L, H115V, H115C, H115Q, A126T, H134Q, H134R, H134N, P135A, K138S, L143V, R160G, F178V, Q192R, Q192K, M196V, M196L, M196F, F222S, F222M, F222C, N227L, K233E, L240S, L240V, H243R, F264L, E276A, C284A, C284S, H285R, M289I, F292S, F292V, F292L, F293S, A301G, N324D, T326S, T332S, T332M, T332C, T332A, and V346A with respect to a paraoxonase set forth in SEQ ID NO:258 (see, U.S. Pat. App No. 20110171197; Int. Pat. Pub. No. WO2011033506; Hassett et al., (1991) Biochemistry 30:10141-10149; Adkins et al., (1993) Am J Hum Genet. 52:598-608; Sorenson et al., (1995) Proc Natl Acad Sci USA 92:7187-7191; Sorenson et al., (1999) Arterioscler Thromb Vasc Biol 19:2214-2225; Harel et al., (2004) Nat Struct Mol Biol 11:412-419; and Marchesani et al., (2003) J Natl Cancer Inst 95:812-818).

[0323] ii. Organophosphorus Hydrolases

[0324] Organophosphorus hydrolases (EC 3.1.8.1; OPH, also known as phosphotriesterase, PTE) are (β/α)8-barrel enzymes with binuclear metal centers located at the C-terminal end of the barrel that hydrolyze organophosphorus compounds (Vanhooke et al., (1996) Biochemistry 35:6020-6025). The reaction mechanism is proposed to proceed via an SN2-like mechanism in which the metal center enables a hydroxide ion (bridged to the two metal ions) to attack the electrophilic phosphorus of the substrate (Aubert et al., (2004) Biochemistry 43:5707-5715). OPHs are active against a wide range of phosphotriester OP pesticides, including substrates with phosphoryl sulfur (such as parathion) and substrates with methoxy and ethoxy groups.

[0325] Organophosophorus hydrolases are encoded by OpdA genes. Bacterial OpdAs that can be used in the provided combinations and compositions include, but are not limited to, those from Brevunduinibas diminuata MG (SEQ ID NO:278; Serdar and Gibson (1985) Bio/Technology 3:567-571); Flavobacterium sp. (Mulbry et al., (1986) Appl Environ Microbiol 51:926-930); Plesiomonas sp. strain M6 (Zhongli et al., (2001) Appl Environ Microbiol 67:4922-4925); Streptomyces lividans (Rowland et al., (1991) Appl Environ Microbiol 57:440-444); Agrobacterium radiobacter (Horne et al. (2002) Appl Environ Microbiol 68:3371-3376, Gresham et al., (2010) Acad Emerg Med 17:736-740); Sulfolobus solfataricus (SEQ ID NO:277); E. coli K12 (SEQ ID NO:282), Drosophila melanogaster (SEQ ID NO:283).

[0326] Also included in the compositions, combinations or methods provided herein are variants of any of SEQ ID NOS:277-278 and 282-283 that have at least or about at least or about or 60%, 70%, 80%, 90%, 91%, 92%, 93%, 94%, 95%, 96%, 97%, 98%, 99% or more sequence identity to any of SEQ ID NOS: 277-278 and 282-283. Amino acid variants include variants that contain conservative and non-conservative mutations. It is understood that residues that are important or otherwise required for the activity of a organophosphorus hydrolase, such as any described above or known to skill in the art, are generally invariant and cannot be changed. These include, for example, active site residues.

[0327] Organophosophorus hydrolases in the combinations and compositions provided herein also can include variants that have one or more amino acid modifications and that exhibit an altered, such as improved, activity compared to an organophosophorus hydrolase not including the modification. Such variants include those that contain one or more amino acid modifications that enhance the catalytic activity of the organophosophorus hydrolase. For example, the amino acid modification(s) can be an amino acid replacements (substitutions), deletions or insertions. Hence, provided in the compositions and combinations herein are modified or variant organophosophorus hydrolases containing at least one mutation corresponding to A14T, L17P, R67H, A80V, L87S, V116I, L130M, Q148R, L182S, K185R, A203T, H254R, H257Y, I274N, V310A, P342S and S365P with respect to the organophosophorus hydrolase set forth in SEQ ID NO:278 (Cho et al., (2002) Appl Environ Microbiol 68:2026-2030; Cho et al. (2006) Protein Eng Des Sel 19:99-105; and Cho et al., (2004) Appl Environ Microbiol 70:4681-4685). The variant or modified organophosophorus hydrolases can include those with more than one mutation such as having any amino acid replacements corresponding to A80V/S365P, L182SN301A, H257Y/1274N/S365P, L130M/H257Y/1274N, A14T/A80V/K185R/H257Y/1274N, A14T/180V/K185R/1274N, A14T/R67H/A80V/L87S/Q148R/K185R, A14T/A80V/K185R, A14T/A80V/K185R/H254R/1274N and A14T/L17P/A80VN1161/K185R/A203T/1274N/P342S of the sequence of amino acids set forth in SEQ ID NO:278 (Cho et al., (2002) Appl Environ Microbiol 68:2026-2030; Cho et al. (2006) Protein Eng Des Sel 19:99-105; and Cho et al., (2004) Appl Environ Microbiol 70:4681-4685).

[0328] iii. Parathion Hydrolases

[0329] Parathion hydrolases are enzymes, typically bacterial enzymes, categorized by their ability to hydrolyze the organophosphorus compound parathion (O,O-diethyl-O-4-nitrophenyl phosphorothioate). Parathion hydrolases that can be included in the compositions, combinations and methods provided herein include, but are not limited to, parathion hydrolase from Burkholderia sp. JBA3 (SEQ ID NO:300; Kim et al., (2007) J Microbiol Biotechnol 17:1890-1893); Pseudomonas diminuta MG or Brevundiomonas diminuta (SEQ ID NO:278) (Serdar et al., (1989) Nature Biotechnology 7:1151-1155); Flavobacterium sp. strain ATCC 27551 (SEQ ID NO:279); Flavobacterium sp. strain MTCC 2495 (SEQ ID NO:298); and Sulfolobus acidocaldarius (SEQ ID NOS:280 and 281); methyl parathion hydrolase (MPH) from Bacillus subtilis WB800 (Zhang et al., (2005) Appl Environ Microbiol 71:4101-4103); and methyl parathion hydrolase from Plesiomonas sp. strain M6 (SEQ ID NO:297, Cui et al., (2001) Appl Environ Microbiol 67:4922-4925). A parathion hydrolase set forth in any of SEQ ID NOS:278-281, 297-298 and 300, active fragments thereof, and variants thereof can be used in the combinations, compositions or methods provided herein.

[0330] Also included in the compositions, combinations or methods provided herein are variants of any of SEQ ID NOS: 278-281, 297-298 and 300 that have at least or about at least or about or 60%, 70%, 80%, 90%, 91%, 92%, 93%, 94%, 95%, 96%, 97%, 98%, 99% or more sequence identity to any of SEQ ID NOS: 278-281, 297-298 and 300. Amino acid variants include variants that contain conservative and non-conservative mutations. It is understood that residues that are important or otherwise required for the activity of a parathion hydrolase, such as any described above or known to skill in the art, are generally invariant and cannot be changed. These include, for example, active site residues.

[0331] b. Diisopropyl fluorophosphatases

[0332] Diisopropyl fluorophosphatases (DFPase; EC 3.1.8.2) are divalent cation-dependent phosphotriesterases that are capable of hydrolyzing a variety of organophosphorus compounds including diisopropyl fluorophosphates (DFP) and G-type organophosphorus nerve agents, such as sarin (GB), soman (GD) and cyclosarin (GF) (Blum et al., (2010) Acta Crystallogr Sect F Struct Biol Cyst Commun 66(Pt 4):379-385). DFPases include tabunase, somanase, organophosphorus acid anhydrolase (OPA), organophosphate acid anhydrase (OPA), OPA anhydrase (OPAA), prolidases, diisopropylphosphofluoridase, dialkylfluorophosphatase, diisopropyl phosphorofluoridate hydrolase, isopropylphosphorofluoridase, diisopropyl fluorophosphonate dehalogenase and senescence marker protein 30 (SMP30).

[0333] Diisopropyl fluorophosphatases include, but are not limited to, DFPases from Loligo vulgaris (squid; SEQ ID NO:286), Alteromonas sp. (SEQ ID NO:287), Pseudoalteromonas haloplanktis (SEQ ID NO:288), Marinomonas mediterranea (SEQ ID NO:289), Aplysia californica (SEQ ID NO:301; Int. Pat Pub. No. WO2010128116), Octopus vulgaris (SEQ ID NO:299; Int. Pat. Pub. No. WO2010128115), Homo sapiens (SEQ ID NO:285) and rat senescence marker protein 30 (SEQ ID NO:290). Exemplary of a diisopropyl fluorophosphatase used in the combinations, compositions or methods provided herein is diisopropyl fluorophosphatase from Loligo vulgaris (SEQ ID NO:286). A diisopropyl fluorophosphatases set forth in any of SEQ ID NOS:285-290, 299 and 301, active fragments thereof, and variants thereof can be used in the combinations, compositions or methods provided herein

[0334] Also included in the compositions, combinations or methods provided herein are variants of any of SEQ ID NOS: 286-290, 299 and 301 that have at least or about at least or about or 60%, 70%, 80%, 90%, 91%, 92%, 93%, 94%, 95%, 96%, 97%, 98%, 99% or more sequence identity to any of SEQ ID NOS: 285-290, 299 and 301. Amino acid variants include variants that contain conservative and non-conservative mutations. It is understood that residues that are important or otherwise required for the activity of a diisopropyl fluorophosphatase, such as any described above or known to skill in the art, are generally invariant and cannot be changed. These include, for example, active site residues. Thus, for example, amino acid residues His287 (corresponding to residues in the diisopropyl fluorophosphatase Loligo vulgaris set forth in SEQ ID NO:286) of a diisopropyl fluorophosphatase is generally invariant and is not altered.

[0335] Diisopropyl fluorophosphatases in the combinations and compositions provided herein also can include variants that have one or more amino acid modifications and that exhibit an altered, such as improved, activity compared to an diisopropyl fluorophosphatase not including the modification. Such variants include those that contain one or more amino acid modifications that enhance the catalytic activity of the diisopropyl fluorophosphatase. For example, the amino acid modification(s) can be an amino acid replacements (substitutions), deletions or insertions. Hence, provided in the compositions and combinations herein are modified or variant diisopropyl fluorophosphatases containing at least one mutation corresponding to Q77Y, Q77W, Y144S, R146S, M148A, F173L, F173V, F173W, H181N, T195L, T195V, H219N, H224N, D232S, N237S, W244Y, W244H, H248N, S271A, H287F, H287L, H287W, Q304F, Q304W and F314A with respect to the diisopropyl fluorophosphatase set forth in SEQ ID NO:286 (Katsemi et al., (2005) Biochemistry 44:9022-9033; Hartleib and Rueterjans (2001) Biochim Biophys Acta 353:579-589; and Scharff et al., (2001) Structure 9:493-502).

[0336] i. Organophosphate Acid Anhydrolases

[0337] Organophosphate acid anhydrolases (OPAA) are members of a class of bimetalloenzymes that hydrolyze a variety of toxic acetylcholinesterase-inhibiting organophosphorus compounds, including fluorine-containing chemical nerve agents. It also belongs to a family of prolidases, with significant activity against various Xaa-Pro dipeptides. The X-ray structure of native OPAA (58 kDa mass) from Alteromonas sp. strain JD6.5 reveals the OPAA structure is composed of two domains, amino and carboxy domains, with the latter exhibiting a “pita bread” architecture and harboring the active site with the binuclear Mn²⁺ ions (Vyas et al., (2010) Biochemistry 49:547-549).

[0338] Organophosphate acid anhydrolases include, but are not limited to, OPAA from Mycobacterium sp.; Amycolatopsis mediterranei; Streptomyces coelicolor; Streptomyces sp AA4; Streptomyces lividans TK24; Streptomyces sviceus ATCC29083; and Streptomyces griseoaurantiacus M045 and active fragments thereof, and variants thereof can be used in the combinations, compositions or methods provided herein. Amino acid variants include variants that contain conservative and non-conservative mutations. It is understood that residues that are important or otherwise required for the activity of a organophosphate acid anhydrolase, such as any described above or known to skill in the art, are generally invariant and cannot be changed. These include, for example, active site residues.

[0339] 3. Modified Organophosphorus Bioscavengers

[0340] The organophosphorus bioscavengers for use in the compositions, combinations and methods provided herein can be modified, such as by, conjugation to polymeric molecules or by fusion or attachment to other proteins. For example, the provided compositions, combinations and methods contain organophosphorus bioscavengers can be modified by conjugation to one or more polymeric molecules (e.g., polymer). In some examples, conjugation to a polymer increases the half-life of the organophosphorus bioscavenger, for example, to promote prolonged/sustained treatment effects in a subject. In another example, the organophosphorus bioscavengers used in the provided compositions, combinations and methods can be modified by fusion or attachment to proteins, such as immunoglobulins or immunoglobulin domains, albumins, transferrins, and transferrin receptor proteins, which also can effect an increase in stability and/or serum half-life

[0341] a. Polymer Modified Organophosphorus Bioscavengers

[0342] Any OP bioscavenger in the provided compositions, combinations and methods can be modified by attachment to polymers. Covalent or other stable attachment (conjugation) of polymeric molecules, such as polyethylene glycol (PEGylation moiety (PEG)), to the OP bioscavengers, such as cholinesterases, impart beneficial properties to the resulting OP bioscavenger-polymer composition. Such properties include improved biocompatibility, extension of protein (and enzymatic activity) half-life in the serum within a subject, effective shielding of the protein from proteases and hydrolysis, improved biodistribution, enhanced pharmacokinetics and/or pharmacodynamics, and increased water solubility.

[0343] Exemplary polymers that can be conjugated to the organophosphorus bioscavenger, such as a butyrylcholinesterase, in the provided compositions and combinations include natural and synthetic homopolymers, such as polyols (i.e. poly-OH), polyamines (i.e. poly-NH₂) and polycarboxyl acids (i.e. poly-COOH), and further heteropolymers i.e. polymers containing one or more different coupling groups e.g. a hydroxyl group and amine groups. Examples of suitable polymeric molecules include polymeric molecules selected from among polyalkylene oxides (PAO), such as polyalkylene glycols (PAG), including polypropylene glycols (PEG), methoxypolyethylene glycols (mPEG) and polypropylene glycols, PEG-glycidyl ethers (Epox-PEG), PEG-oxycarbonylimidazole (CDI-PEG), branched polyethylene glycols (PEGs), polyvinyl alcohol (PVA), polycarboxylates, polyvinylpyrrolidone, poly-D,L-amino acids, polyethylene-co-maleic acid anhydride, polystyrene-co-maleic acid anhydride, dextrans including carboxymethyl-dextrans, heparin, homologous albumin, celluloses, including methylcellulose, carboxymethylcellulose, ethylcellulose, hydroxyethylcellulose carboxyethylcellulose and hydroxypropylcellulose, hydrolysates of chitosan, starches such as hydroxyethyl-starches and hydroxypropyl-starches, glycogen, agaroses and derivatives thereof, guar gum, pullulan, inulin, xanthan gum, carrageenan, pectin, alginic acid hydrolysates and bio-polymers.

[0344] Typically, the polymers are polyalkylene oxides (PAO), such as polyethylene oxides, such as PEG, typically mPEG, which, in comparison to polysaccharides such as dextran and pullulan, have few reactive groups capable of cross-linking. Typically, the polymers are non-toxic polymeric molecules such as (m)polyethylene glycol (mPEG) which can be covalently conjugated to the organophosphorus bioscavenger, such as a butyrylcholinesterase (e.g. to attachment groups on the protein's surface) using a relatively simple chemistry.

[0345] PEGylation of therapeutics has been reported to increase resistance to proteolysis, increase plasma half-life, and decrease antigenicity and immunogenicity. Examples of PEGylation methodologies are known in the art (see for example, Lu and Felix, Int. J. Peptide Protein Res., 43:127-138, 1994; Lu and Felix, Peptide Res., 6:142-6, 1993; Felix et al., Int. J. Peptide Res., 46:253-64, 1995; Benhar et al., J. Biol. Chem., 269: 13398-404, 1994; Brumeanu et al., J Immunol., 154:3088-95, 1995; see also, Caliceti et al. (2003) Adv. Drug Deliv. Rev. 55(10):1261-77 and Molineux (2003) Pharmacotherapy 23 (8 Pt 2):3S-8S). PEGylation also can be used in the delivery of nucleic acid molecules in vivo. For example, PEGylation of adenovirus can increase stability and gene transfer (see, e.g., Cheng et al. (2003) Pharm. Res. 20(9):1444-51).

[0346] Suitable polymeric molecules for attachment to the organophosphorus bioscavengers, include, but are not limited to, polyethylene glycol (PEG) and PEG derivatives such as methoxy-polyethylene glycols (mPEG), PEG-glycidyl ethers (Epox-PEG), PEG-oxycarbonylimidazole (CDI-PEG), branched PEGs, and polyethylene oxide (PEO) (see e.g. Roberts et al., Advanced Drug Delivery Review (2002) 54: 459-476; Harris and Zalipsky, S (eds.) “Poly(ethylene glycol), Chemistry and Biological Applications” ACS Symposium Series 680, 1997; Mehvar et al., J. Pharm. Pharmaceut. Sci., 3(1):125-136, 2000; Harris, (2003) Nature Reviews Drug Discovery 2:214-221; and Tsubery, (2004) J Biol. Chem. 279(37):38118-24). The polymeric molecule can be of a molecular weight typically ranging from about 3 kDa to about 60 kDa. In some embodiments the polymeric molecule that is conjugated to an OP bioscavenger has a molecular weight of at least or about at least or 5, 10, 15, 20, 25, 30, 35, 40, 45, 50, 55, 60 or more, such as more than 60 kDa.

[0347] PEGylated Organophosphorus Bioscavengers

[0348] The organophosphorus bioscavenger used in the provided compositions, combinations and methods can be a PEGylated organophosphorus bioscavenger, such as a PEGylated acetylcholinesterase or PEGylated butyrylcholinesterase, e.g., PEG-rBChE (Protexia®). Various methods of modifying polypeptides by covalently attaching (conjugating) a PEG or PEG derivative (“PEGylation”) are know in the art (see, e.g., U.S. Pat. Pub. Appl. Nos. 20110135623, 20090249503, 20090208480, and 20040235734; U.S. Pat. Nos. 7,572,764; 5,672,662, 6,737,505; and Huang et al., (2007) Proc Natl Acad Sci USA 104:13603-13608; Kronman et al., (2010) Chem Biol Interact 187:253-258). Techniques for PEGylation include, but are not limited to, specialized linkers and coupling chemistries (see e.g., Harris, Adv. Drug Deliv. Rev. 54:459-476, 2002), attachment of multiple PEG moieties to a single conjugation site (such as via use of branched PEGs; see e.g., Veronese et al., Bioorg. Med. Chem. Lett. 12:177-180, 2002), site-specific PEGylation and/or mono-PEGylation (see e.g., Chapman et al., Nature Biotech. 17:780-783, 1999), and site-directed enzymatic PEGylation (see e.g., Sato, Adv. Drug Deliv. Rev., 54:487-504, 2002). Methods and techniques described in the art can produce proteins having 1, 2, 3, 4, 5, 6, 7, 8, 9, 10 or more than 10 PEG or PEG derivatives attached to a single protein molecule (see e.g., U.S. 2009/0249503).

[0349] Numerous reagents for PEGylation have been described in the art. Such reagents include, but are not limited to, N-hydroxysuccinimidyl (NHS) activated PEG, succinimidyl mPEG, mPEG₂-N-hydroxysuccinimide, mPEG succinimidyl alpha-methylbutanoate, mPEG succinimidyl propionate, mPEG succinimidyl butanoate, mPEG carboxymethyl 3-hydroxybutanoic acid succinimidyl ester, homobifunctional PEG-succinimidyl propionate, homobifunctional PEG propionaldehyde, homobifunctional PEG butyraldehyde, PEG maleimide, PEG hydrazide, p-nitrophenyl-carbonate PEG, mPEG-benzotriazole carbonate, propionaldehyde PEG, mPEG butryaldehyde, branched mPEG₂ butyraldehyde, mPEG acetyl, mPEG piperidone, mPEG methylketone, mPEG “linkerless” maleimide, mPEG vinyl sulfone, mPEG thiol, mPEG orthopyridylthioester, mPEG orthopyridyl disulfide, Fmoc-PEG-NHS, Boc-PEG-NHS, vinylsulfone PEG-NHS, acrylate PEG-NHS, fluorescein PEG-NHS, and biotin PEG-NHS (see e.g., Monfardini et al., Bioconjugate Chem. 6:62-69, 1995; Veronese et al., J. Bioactive Compatible Polymers 12:197-207, 1997; U.S. Pat. No. 5,672,662; U.S. Pat. No. 5,932,462; U.S. Pat. No. 6,495,659; U.S. Pat. No. 6,737,505; U.S. Pat. No. 4,002,531; U.S. Pat. No. 4,179,337; U.S. Pat. No. 5,122,614; U.S. Pat. No. 5,324,844; U.S. Pat. No. 5,446,090; U.S. Pat. No. 5,612,460; U.S. Pat. No. 5,643,575; U.S. Pat. No. 5,766,581; U.S. Pat. No. 5,795,569; U.S. Pat. No. 5,808,096; U.S. Pat. No. 5,900,461; U.S. Pat. No. 5,919,455; U.S. Pat. No. 5,985,263; U.S. Pat. No. 5,990,237; U.S. Pat. No. 6,113,906; U.S. Pat. No. 6,214,966; U.S. Pat. No. 6,258,351; U.S. Pat. No. 6,340,742; U.S. Pat. No. 6,413,507; U.S. Pat. No. 6,420,339; U.S. Pat. No. 6,437,025; U.S. Pat. No. 6,448,369; U.S. Pat. No. 6,461,802; U.S. Pat. No. 6,828,401; U.S. Pat. No. 6,858,736; U.S. 2001/0021763; U.S. 2001/0044526; U.S. 2001/0046481; U.S. 2002/0052430; U.S. 2002/0072573; U.S. 2002/0156047; U.S. 2003/0114647; U.S. 2003/0143596; U.S. 2003/0158333; U.S. 2003/0220447; U.S. 2004/0013637; US 2004/0235734; U.S. 2005/0114037; U.S. 2005/0171328; U.S. 2005/0209416; EP 01064951; EP 0822199; WO 00176640; WO0500360; WO 0002017; WO 0249673; WO 9428024; and WO 0187925).

[0350] A PEG moiety can be attached to the N-terminal amino acid, a cysteine residue (either native or non-native) or other thiol group, a lysine, or other reactive native or non-native amino acids in the protein's primary sequence.

[0351] b. Other Modifications

[0352] Organophosphorus bioscavengers used in the provided compositions, combinations and methods can be modified by fusion or attachment to proteins, such as immunoglobulins or immunoglobulin domains, albumins, transferrins, and transferrin receptor proteins, to increase stability and serum half-life. The OP bioscavenger can be fused to the N-terminus or C-terminus of the protein. In one example, the protein is fused to the C-terminus of the OP bioscavenger. In another example, the protein is fused to the N-terminus of the organophosphorus bioscavenger. Typically, the organophosphorus bioscavenger joined to the fusion protein by a linker peptide containing 1-50 amino acids, typically at least 6 amino acids, such as 1, 2, 3, 4, 5, 6, 7, 8, 9, 10, 11, 12, 13, 14, 15, 20, 25, 30, 35, 40, 45 or 50 amino acids.

[0353] For example, immunoglobulins or immunoglobulin domains for fusion or attachment to an organophosphorus bioscavenger herein includes, but is not limited to, an immunoglobulin (Ig) domain, such as an Fc region, heavy chain constant domains of IgG1, IgG2, IgG3 or IgG4, including C_{H}1, hinge, C_{H}2, C_{H}3 and C_{H}4, or light chain constant domain C_{L} (see, U.S. Pat. Pub. No. 2009/0249503).

[0354] An albumin for fusion or attachment to an organophosphorous bioscavenger herein includes, but is not limited to albumins, including human serum albumin (HSA) or HSA polypeptides, to form a BChE-HSA fusion protein (see, U.S. Pat. Pub. No. 2006/0253913)

[0355] In addition, butyrylcholinesterases used herein can be modified by attachment to a domain that results in expression of stable tetrameric forms of BChE, such as a proline-rich attachment domain (PRAD) (see, Bon et al., (1997) J Biol Chem 272:3016-3021 and Krejci et al., (1997) J Biol Chem 272:22840-22847). As such, any butyrylcholinesterase in the provided compositions, combinations and methods can contain a PRAD sequence that contains at least six amino acids followed by a string of at least 10 proline residues.

### D. HYALURONAN-DEGRADING ENZYMES

[0356] Provided herein are compositions and combinations containing a hyaluronan-degrading enzyme and a OP bioscavenger. Hyaluronan-degrading enzymes act to degrade hyaluronan by cleaving hyaluronan polymers. Hyaluronan is an essential component of the extracellular matrix and a major constituent of the interstitial barrier. By catalyzing the hydrolysis of hyaluronan, hyaluronan-degrading enzymes lower the viscosity of hyaluronan, thereby increasing tissue permeability and increasing the absorption rate of fluids administered parenterally. As such, hyaluronan-degrading enzymes, such as hyaluronidases, have been used, for example, as spreading or dispersing agents in conjunction with other agents, drugs and proteins to enhance their dispersion and delivery. Hyaluronan-degrading enzymes also are used as an adjuvant to increase the absorption and dispersion of other injected drugs, for hypodermoclysis (subcutaneous fluid administration), and as an adjunct in subcutaneous urography for improving resorption of radiopaque agents. Hyaluronan-degrading enzymes, for example, hyaluronidase can be used in applications of ophthalmic procedures, for example, peribulbar and sub-Tenon's block in local anesthesia prior to ophthalmic surgery. Hyaluronidase also can be use in other therapeutic and cosmetic uses, for example, by promoting akinesia in cosmetic surgery, such as blepharoplasties and face lifts.

[0357] In particular, hyaluronan-degrading enzymes act to degrade hyaluronan by cleaving hyaluronan polymers, which are composed of repeating disaccharides units, D-glucuronic acid (GlcA) and N-acetyl-D-glucosamine (GlcNAc), linked together via alternating β-1→4 and β-1→3 glycosidic bonds. Hyaluronan chains can reach about 25,000 disaccharide repeats or more in length and polymers of hyaluronan can range in size from about 5,000 to 20,000,000 Da in vivo. Accordingly, hyaluronan-degrading enzymes for the compositions, combinations and methods provided include any enzyme having the ability to catalyze the cleavage of a hyaluronan disaccharide chain or polymer. In some examples the hyaluronan-degrading enzyme cleaves the β-1→4 glycosidic bond in the hyaluronan chain or polymer. In other examples, the hyaluronan-degrading enzyme catalyze the cleavage of the β-1→3 glycosidic bond in the hyaluronan chain or polymer.

[0358] Various forms of hyaluronan-degrading enzymes, including hyaluronidases have been prepared and approved for therapeutic use in subjects, including humans. For example, animal-derived hyaluronidase preparations include Vitrase® (ISTA Pharmaceuticals), a purified ovine testicular hyaluronidase, Amphadase® (Amphastar Pharmaceuticals), a bovine testicular hyaluronidase and Hydase™ (Prima Pharm Inc.), a bovine testicular hyaluronidase. It is understand that any animal-derived hyaluronidase preparation can be used in the compositions, combinations and methods provided herein (see, e.g., U.S. Pat. Nos. 2,488,564, 2,488,565, 2,676,139, 2,795,529, 2,806,815, 2,808,362, 5,747,027 and 5,827,721 and Internation PCT Application No. WO2005/118799). Hylenex® (Halozyme Therapeutics) is a human recombinant hyaluronidase produced by genetically engineered Chinese Hamster Ovary (CHO) cells containing nucleic acid encoding soluble forms of PH20, designated rHuPH20 (see, e.g. U.S. Publication No. US 2004/0268425 and U.S. Pat. No. 7,767,429).

[0359] Exemplary hyaluronan-degrading enzymes for use in the compositions, combinations and methods provided herein include hyaluronidases, as well as other enzymes such as chondrotinases and lyases that have the ability to cleave hyaluronan. Further, hyaluronan-degrading enzymes also include soluble forms thereof that can be expressed and secreted from cells. As described below, hyaluronan-degrading enzymes exist in membrane-bound or soluble forms that are secreted from cells. For purposes herein, soluble hyaluronan-degrading enzymes are provided for use in the compositions, combinations and methods herein. Thus, where hyaluronan-degrading enzymes include a glycosylphosphatidylinositol (GPI) anchor attachment signal sequence and/or are otherwise membrane-anchored or insoluble, such hyaluronan-degrading enzymes can be provided in soluble form by truncation or deletion of the GPI anchor attachment signal sequence to render the enzyme secreted and soluble. Thus, hyaluronan-degrading enzymes include truncated variants, e.g. truncated to remove all or a portion of a GPI anchor. Exemplary of such soluble hyaluronidases are soluble PH20 hyaluronides, such as any set forth in U.S. Pat. No. 7,767,429; U.S. Publication Nos. US 2004/0268425 or US 2010/0143457.

[0360] Hyaluronan-degrading enzymes provided herein also include variants of any hyaluronan-degrading enzyme, such as any hyaluronidase or soluble hyaluronidase, for example a PH20, that is known to one of skill in the art or described herein. A variant can include an allelic or species variant or other variant. For example, hyaluronan-degrading enzymes can contain one or more variations in its primary sequence, such as amino acid substitutions, additions and/or deletions. A variant of a hyaluronan-degrading enzyme generally exhibits at least or about 60%, 70%, 80%, 90%, 91%, 92%, 93%, 94%, 95%, 96%, 97%, 98%, 99% or more sequence identity compared to the hyaluronan-degrading enzyme not containing the variation. Any variation can be included in the hyaluronan-degrading enzyme for the purposes herein, provided the enzyme retains hyaluronidase activity, such as at least or about 5%, 10%, 15%, 20%, 25%, 30%, 35%, 40%, 45%, 50%, 55%, 60%, 65%, 70%, 75%, 80%, 85%, 90%, 95% or more of the activity of a hyaluronan-degrading enzyme not containing the variation (as measured by in vitro and/or in vivo assays well known in the art and described herein). For example, exemplary of hyaluronan-degrading enzymes are any set forth in any of SEQ ID NOS:1, 2, 4-9, 47, 48, 150-170, 183-189 and 302-313, including mature forms thereof (lacking the signal sequence) or any that exhibit at least or about 60%, 70%, 80%, 90%, 91%, 92%, 93%, 94%, 95%, 96%, 97%, 98%, 99% or more sequence identity to any of SEQ ID NOS:1, 2, 4-9, 47, 48, 150-170, 183-189 and 302-313 or a mature form thereof lacking the signal sequence.

[0361] A non-limiting description of exemplary hyaluronan-degrading enzymes, such as hyaluronidase enzymes or soluble hyaluronidase enzymes, for example PH20, for use in the combinations, compositions and methods provided herein are described below. Such hyaluronan-degrading enzymes include those that are modified, for example, by conjugation to a polymer or other moieity.

[0362] 1. Hyaluronidases

[0363] Hyaluronidases are members of a large family of hyaluronan-degrading enzymes. There are three general classes of hyaluronidases: mammalian-type hyaluronidases, bacterial hyaluronidases and hyaluronidases from leeches, other parasites and crustaceans. Such enzymes can be used in the compositions, combinations and methods provided herein.

[0364] a. Mammalian-Type Hyaluronidases

[0365] Mammalian-type hyaluronidases (EC 3.2.1.35) are endo-β-N-acetyl-hexosaminidases that hydrolyze the β-1→4 glycosidic bond of hyaluronan into various oligosaccharide lengths such as tetrasaccharides and hexasaccharides. These enzymes have both hydrolytic and transglycosidase activities, and can degrade hyaluronan and chondroitin sulfates (CS), generally C4-S and C6-S. Hyaluronidases of this type include, but are not limited to, hyaluronidases from cows (bovine) (SEQ ID NOS:10, 11, 64, 306 and 307, and nucleic acid molecules set forth in SEQ ID NOS:190-192), sheep (Ovis aries) (SEQ ID NO: 26, 27, 63 and 65, nucleic acid molecules set forth in SEQ. ID NOS:66 and 193-194), yellow jacket wasp (SEQ ID NOS:12 and 13), honey bee (SEQ ID NO:14), white-face hornet (SEQ ID NO:15), paper wasp (SEQ ID NO:16), mouse (SEQ ID NOS:17-19, 32, 308), pig (SEQ ID NOS:20-21), rat (SEQ ID NOS:22-24, 31, 309), rabbit (SEQ ID NO:25, 310), orangutan (SEQ ID NO:28), cynomolgus monkey (SEQ ID NO:29, 305), guinea pig (SEQ ID NO:30, 311), chimpanzee (SEQ ID NO:101, 302, 303), rhesus monkey (SEQ ID NO:102, 304), fox (SEQ ID NO:312 and 313), and human hyaluronidases (SEQ ID NOS:1-2, 36-39). The above hyaluronidases include PH20 hyaluronidases. Also, BH55 hyaluronidase is of this type as described in U.S. Pat. Nos. 5,747,027 and 5,827,721. Exemplary of hyaluronidases in the compositions, combinations and methods provided herein are soluble hyaluronidases that are soluble forms of any of the above hyaluronidase, and that can be secreted from cells.

[0366] Mammalian hyaluronidases can be further subdivided into those that are neutral active, predominantly found in testes extracts, and acid active, predominantly found in organs such as the liver. Exemplary neutral active hyaluronidases include PH20, including but not limited to, PH20 derived from different species such as ovine (SEQ ID NOS:27, 63 and 65), bovine (SEQ ID NO:11 and 64) and human (SEQ ID NO:1). Human PH20 (also known as SPAM1 or sperm surface protein PH20), is generally attached to the plasma membrane via a glycosylphosphatidyl inositol (GPI) anchor. It is naturally involved in sperm-egg adhesion and aids penetration by sperm of the layer of cumulus cells by digesting hyaluronic acid.

[0367] Besides human PH20 (also termed SPAM1), five hyaluronidase-like genes have been identified in the human genome, HYAL1, HYAL2, HYAL3, HYAL4 and HYALP1. HYALP1 is a pseudogene, and HYAL3 (SEQ ID NO:38) has not been shown to possess enzyme activity toward any known substrates. HYAL4 (precursor polypeptide set forth in SEQ ID NO:39) is a chondroitinase and exhibits little activity towards hyaluronan. HYAL1 (precursor polypeptide set forth in SEQ ID NO:36) is the prototypical acid-active enzyme and PH20 (precursor polypeptide set forth in SEQ ID NO:1) is the prototypical neutral-active enzyme. Acid-active hyaluronidases, such as HYAL1 and HYAL2 (precursor polypeptide set forth in SEQ ID NO:37) generally lack catalytic activity at neutral pH (i.e. pH 7). For example, HYAL1 has little catalytic activity in vitro over pH 4.5 (Frost et al. (1997) Anal. Biochem. 251:263-269). HYAL2 is an acid-active enzyme with a very low specific activity in vitro. The hyaluronidase-like enzymes also can be characterized by those which are generally attached to the plasma membrane via a glycosylphosphatidyl inositol (GPI) anchor such as human HYAL2 and human PH20 (Danilkovitch-Miagkova et al. (2003) Proc Natl Acad Sci USA 100(8):4580-5), and those which are generally soluble such as human HYAL1 (Frost et al. (1997) Biochem Biophys Res Commun. 236(1):10-5).

[0368] PH20

[0369] PH20, like other mammalian hyaluronidases, is an endo-β-N-acetyl-hexosaminidase that hydrolyzes the 131-04 glycosidic bond of hyaluronic acid into various oligosaccharide lengths such as tetrasaccharides and hexasaccharides. It has both hydrolytic and transglycosidase activities and can degrade hyaluronic acid and chondroitin sulfates, such as C4-S and C6-S. PH20 is naturally involved in sperm-egg adhesion and aids penetration by sperm of the layer of cumulus cells by digesting hyaluronic acid. PH20 is located on the sperm surface, and in the lysosome-derived acrosome, where it is bound to the inner acrosomal membrane. Plasma membrane PH20 has hyaluronidase activity only at neutral pH, while inner acrosomal membrane PH20 has activity at both neutral and acid pH. In addition to being a hyaluronidase, PH20 also appears to be a receptor for HA-induced cell signaling, and a receptor for the zona pellucida surrounding the oocyte.

[0370] Exemplary PH20 proteins include, but are not limited to, human (precursor polypeptide set forth in SEQ ID NO:1, mature polypeptide set forth in SEQ ID NO: 2), chimpanzee (SEQ ID NO:101, 302, 303), Rhesus monkey (SEQ ID NO:102, 304) bovine (SEQ ID NOS: 11, 64, 306, 307), rabbit (SEQ ID NO: 25, 310), ovine PH20 (SEQ ID NOS: 27, 63 and 65), Cynomolgus monkey (SEQ ID NO: 29, 305), guinea pig (SEQ ID NO: 30, 311), rat (SEQ ID NO: 31, 309), mouse (SEQ ID NO: 32, 308) and fox (SEQ ID NO:312 and 313) PH20 polypeptides.

[0371] Bovine PH20 is a 553 amino acid precursor polypeptide (SEQ ID NO:11). Alignment of bovine PH20 with the human PH20 shows only weak homology, with multiple gaps existing from amino acid 470 through to the respective carboxy termini due to the absence of a GPI anchor in the bovine polypeptide (see e.g., Frost GI (2007) Expert Opin. Drug. Deliv. 4: 427-440). In fact, clear GPI anchors are not predicted in many other PH20 species besides humans. Thus, PH20 polypeptides produced from ovine and bovine naturally exist as soluble forms. Though bovine PH20 exists very loosely attached to the plasma membrane, it is not anchored via a phospholipase sensitive anchor (Lalancette et al. (2001) Biol Reprod. 65(2):628-36). This unique feature of bovine hyaluronidase has permitted the use of the soluble bovine testes hyaluronidase enzyme as an extract for clinical use (Wydase®, Hyalase®).

[0372] The human PH20 mRNA transcript is normally translated to generate a 509 amino acid precursor polypeptide (SEQ ID NO:1) containing a 35 amino acid signal sequence at the N-terminus (amino acid residue positions 1-35) and a 19 amino acid glycosylphosphatidylinositol (GPI) anchor attachment signal sequence at the C-terminus (amino acid residue positions 491-509). The mature PH20 therefore, is a 474 amino acid polypeptide set forth in SEQ ID NO:2. Following transport of the precursor polypeptide to the ER and removal of the signal peptide, the C-terminal GPI-attachment signal peptide is cleaved to facilitate covalent attachment of a GPI anchor to the newly-formed C-terminal amino acid at the amino acid position corresponding to position 490 of the precursor polypeptide set forth in SEQ ID NO:1. Thus, a 474 amino acid GPI-anchored mature polypeptide with an amino acid sequence set forth in SEQ ID NO:2 is produced.

[0373] Human PH20 exhibits hyaluronidase activity at neutral and acid pH. In one aspect, human PH20 is the prototypical neutral-active hyaluronidase that is generally locked to the plasma membrane via a GPI anchor. In another aspect, PH20 is expressed on the inner acrosomal membrane where it has hyaluronidase activity at neutral and acid pH. It appears that PH20 contains two catalytic sites at distinct regions of the polypeptide: the Peptide 1 and Peptide 3 regions (Chem et al., (2001) Matrix Biology 20:515-525). Evidence indicates that the Peptide 1 region of PH20, which corresponds to amino acid positions 107-137 of the mature polypeptide set forth in SEQ ID NO:2 and positions 142-172 of the precursor polypeptide set forth in SEQ ID NO:1, is required for enzyme activity at neutral pH. Amino acids at positions 111 and 113 (corresponding to the mature PH20 polypeptide set forth in SEQ ID NO:2) within this region appear to be important for activity, as mutagenesis by amino acid replacement results in PH20 polypeptides with 3% hyaluronidase activity or undetectable hyaluronidase activity, respectively, compared to the wild-type PH20 (Arming et al., (1997) Eur. J. Biochem. 247:810-814).

[0374] The Peptide 3 region, which corresponds to amino acid positions 242-262 of the mature polypeptide set forth in SEQ ID NO:2, and positions 277-297 of the precursor polypeptide set forth in SEQ ID NO: 1, appears to be important for enzyme activity at acidic pH. Within this region, amino acids at positions 249 and 252 of the mature PH20 polypeptide appear to be essential for activity, and mutagenesis of either one results in a polypeptide essentially devoid of activity (Arming et al., (1997) Eur. J. Biochem. 247:810-814).

[0375] In addition to the catalytic sites, PH20 also contains a hyaluronan-binding site.

[0376] Experimental evidence indicate that this site is located in the Peptide 2 region, which corresponds to amino acid positions 205-235 of the precursor polypeptide set forth in SEQ ID NO: 1 and positions 170-200 of the mature polypeptide set forth in SEQ ID NO:2. This region is highly conserved among hyaluronidases and is similar to the heparin binding motif. Mutation of the arginine residue at position 176 (corresponding to the mature PH20 polypeptide set forth in SEQ ID NO:2) to a glycine results in a polypeptide with only about 1% of the hyaluronidase activity of the wild type polypeptide (Arming et al., (1997) Eur. J. Biochem. 247:810-814).

[0377] There are seven potential glycosylation sites, including N-linked glycosylation sites, in human PH20 at N82, N166, N235, N254, N368, N393, 5490 of the polypeptide exemplified in SEQ ID NO: 1. Because amino acids 36 to 464 of SEQ ID NO:1 appear to contain the minimally active human PH20 hyaluronidase domain, the glycosylation site S490 is not required for proper hyaluronidase activity. There are six disulfide bonds in human PH20. Two disulfide bonds between the cysteine residues C60 and C351 and between C224 and C238 of the polypeptide exemplified in SEQ ID NO: 1 (corresponding to residues C25 and C316, and C189 and C203 of the mature polypeptide set forth in SEQ ID NO:2, respectively). A further four disulfide bonds are formed between the cysteine residues C376 and C387; between C381 and C435; between C437 and C443; and between C458 and C464 of the polypeptide exemplified in SEQ ID NO: 1 (corresponding to residues C341 and C352; between C346 and C400; between C402 and C408; and between C423 and C429 of the mature polypeptide set forth in SEQ ID NO:2, respectively).

[0378] b. Bacterial Hyaluronidases

[0379] Bacterial hyaluronidases (EC 4.2.2.1 or EC 4.2.99.1) degrade hyaluronan and, to various extents, chondroitin sulfates and dermatan sulfates. Hyaluronan lyases isolated from bacteria differ from hyaluronidases (from other sources, e.g., hyaluronoglucosaminidases, EC 3.2.1.35) by their mode of action. They are endo-β-N-acetylhexosaminidases that catalyze an elimination reaction, rather than hydrolysis, of the β1→4-glycosidic linkage between N-acetyl-beta-D-glucosamine and D-glucuronic acid residues in hyaluronan, yielding 3-(4-deoxy-β-D-gluc-4-enuronosyl)-N-acetyl-D-glucosamine tetra- and hexasaccharides, and disaccharide end products. The reaction results in the formation of oligosaccharides with unsaturated hexuronic acid residues at their nonreducing ends.

[0380] Exemplary hyaluronidases from bacteria for use in the compositions, combinations and methods provided include, but are not limited to, hyaluronan-degrading enzymes in microorganisms, including strains of Arthrobacter, Bdellovibrio, Clostridium, Micrococcus, Streptococcus, Peptococcus, Propionibacterium, Bacteroides, and Streptomyces. Particular examples of such strains and enzymes include, but are not limited to Arthrobacter sp. strain FB24 (SEQ ID NO:67), Bdellovibrio bacteriovorus (SEQ ID NO:68), Propionibacterium acnes (SEQ ID NO:69), Streptococcus agalactiae ((SEQ ID NO:70); 18RS21 (SEQ ID NO:71); serotype Ia (SEQ ID NO:72); serotype III (SEQ ID NO:73), Staphylococcus aureus (strain COL (SEQ ID NO:74); strain MRSA252 (SEQ ID NOS:75 and 76); strain MSSA476 (SEQ ID NO:77); strain NCTC 8325 (SEQ ID NO:78); strain bovine RF122 (SEQ ID NOS:79 and 80); strain USA300 (SEQ ID NO:81), Streptococcus pneumoniae ((SEQ ID NO:82); strain ATCC BAA-255/R6 (SEQ ID NO:83); serotype 2, strain D39/NCTC 7466 (SEQ ID NO:84), Streptococcus pyogenes (serotype M1) (SEQ ID NO:85); serotype M2, strain MGAS10270 (SEQ ID NO:86); serotype M4, strain MGAS10750 (SEQ ID NO:87); serotype M6 (SEQ ID NO:88); serotype M12, strain MGAS2096 (SEQ ID NOS:89 and 90); serotype M12, strain MGAS9429 (SEQ ID NO:91); serotype M28 (SEQ ID NO:92); Streptococcus suis (SEQ ID NOS:93-95); Vibrio fischeri (strain ATCC 700601/ES114 (SEQ ID NO:96)), and the Streptomyces hyaluronolyticus hyaluronidase enzyme, which is specific for hyaluronic acid and does not cleave chondroitin or chondroitin sulfate (Ohya, T. and Kaneko, Y. (1970) Biochim. Biophys. Acta 198:607).

[0381] c. Hyaluronidases from Leeches, Other Parasites and Crustaceans

[0382] Hyaluronidases from leeches, other parasites, and crustaceans (EC 3.2.1.36) are endo-β-glucuronidases that generate tetra- and hexasaccharide end-products. These enzymes catalyze hydrolysis of 1-3-linkages between β-D-glucuronate and N-acetyl-D-glucosamine residues in hyaluronate. Exemplary hyaluronidases from leeches include, but are not limited to, hyaluronidase from Hirudinidae (e.g., Hirudo medicinalis), Erpobdellidae (e.g., Nephelopsis obscura and Erpobdella punctata), Glossiphoniidae (e.g., Desserobdella picta, Helobdella stagnalis, Glossiphonia complanata, Placobdella ornata and Theromyzon sp.) and Haemopidae (Haemopis marmorata) (Hovingh et al. (1999) Comp Biochem Physiol B Biochem Mol. Biol. 124(3):319-26). An exemplary hyaluronidase from bacteria that has the same mechanism of action as the leech hyaluronidase is that from the cyanobacteria, Synechococcus sp. (strain RCC307, SEQ ID NO:97).

[0383] 2. Other Hyaluronan-Degrading Enzymes

[0384] In addition to the hyaluronidase family, other hyaluronan-degrading enzymes can be used in the compositions, combinations and methods provided. For example, enzymes, including particular chondroitinases and lyases, that have the ability to cleave hyaluronan can be employed. Exemplary chondroitinases that can degrade hyaluronan include, but are not limited to, chondroitin ABC lyase (also known as chondroitinase ABC), chondroitin AC lyase (also known as chondroitin sulfate lyase or chondroitin sulfate eliminase) and chondroitin C lyase. Methods for production and purification of such enzymes for use in the compositions, combinations, and methods provided are known in the art (e.g., U.S. Pat. No. 6,054,569; Yamagata, et al. (1968) J. Biol. Chem. 243(7):1523-1535; Yang et 111. (1985) J. Biol. Chem. 160(30):1849-1857).

[0385] Chondroitin ABC lyase contains two enzymes, chondroitin-sulfate-ABC endolyase (EC 4.2.2.20) and chondroitin-sulfate-ABC exolyase (EC 4.2.2.21) (Hamai et al. (1997) J Biol. Chem. 272(14):9123-30), which degrade a variety of glycosaminoglycans of the chondroitin-sulfate- and dermatan-sulfate type. Chondroitin sulfate, chondroitin-sulfate proteoglycan and dermatan sulfate are the preferred substrates for chondroitin-sulfate-ABC endolyase, but the enzyme also can act on hyaluronan at a lower rate. Chondroitin-sulfate-ABC endolyase degrades a variety of glycosaminoglycans of the chondroitin-sulfate- and dermatan-sulfate type, producing a mixture of Δ4-unsaturated oligosaccharides of different sizes that are ultimately degraded to Δ4-unsaturated tetra- and disaccharides. Chondroitin-sulfate-ABC exolyase has the same substrate specificity but removes disaccharide residues from the non-reducing ends of both polymeric chondroitin sulfates and their oligosaccharide fragments produced by chondroitin-sulfate-ABC endolyase (Hamai, A. et al. (1997) J. Biol. Chem. 272:9123-9130). Exemplary chondroitin-sulfate-ABC endolyases and chondroitin-sulfate-ABC exolyases include, but are not limited to, those from Proteus vulgaris and Flavobacterium heparinum (the Proteus vulgaris chondroitin-sulfate-ABC endolyase is set forth in SEQ ID NO: 98 (Sato et al. (1994) Appl. Microbiol. Biotechnol. 41(1):39-46).

[0386] Chondroitin AC lyase (EC 4.2.2.5) is active on chondroitin sulfates A and C, chondroitin and hyaluronic acid, but is not active on dermatan sulfate (chondroitin sulfate B). Exemplary (chondroitin AC lyase) from the bacteria include, but are not limited to, those from Flavobacterium heparinum and Victivallis vadensis, set forth in SEQ ID NOS:99 and 100, respectively, and Arthrobacter aurescens (Tkalec et al. (2000) Applied and Environmental Microbiology 66(1):29-35; Ernst et al. (1995) Critical Reviews in Biochemistry and Molecular Biology 30(5):387-444).

[0387] Chondroitinase C (Chondroitin C lyase) cleaves chondroitin sulfate C producing tetrasaccharide plus an unsaturated 6-sulfated disaccharide (delta Di-6S). It also cleaves hyaluronic acid producing unsaturated non-sulfated disaccharide (delta Di-OS). Exemplary chondroitinase C enzymes from the bacteria include, but are not limited to, those from Streptococcus and Flavobacterium (Hibi et al. (1989) FEMS-Microbiol-Lett. 48(2):121-4; Michelacci et al. (1976) J. Biol. Chem. 251:1154-8; Tsuda et al. (1999) Eur. J. Biochem. 262:127-133)

[0388] 3. Soluble Hyaluronan-Degrading Enzymes

[0389] Provided in the compositions, combinations, uses and methods herein are soluble hyaluronan-degrading enzymes, including soluble hyaluronidases. Soluble hyaluronan-degrading enzymes include any hyaluronan-degrading enzymes that are secreted from cells (e.g. CHO cell) upon expression and exist in soluble form. Such enzymes include, but are not limited to, soluble hyaluronidases, including non-human soluble hyaluronidases, including non-human animal soluble hyaluronidases, bacterial soluble hyaluronidases and human hyaluronidases, Hyal1, bovine PH20 and ovine PH20, allelic variants thereof and other variants thereof. For example, included among soluble hyaluronan-degrading enzymes are any hyaluronan-degrading enzymes that have been modified to be soluble. For example, hyaluronan-degrading enzymes that contain a GPI anchor can be made soluble by truncation of and removal of all or a portion of the GPI anchor attachment signal sequence. In one example, the human hyaluronidase PH20, which is normally membrane anchored via a GPI anchor, can be made soluble by truncation of and removal of all or a portion of the GPI anchor attachment signal sequence at the C-terminus.

[0390] Soluble hyaluronan-degrading enzymes also include neutral active and acid active hyaluronidases. Depending on factors, such as, but not limited to, the desired level of activity of the enzyme following administration and/or site of administration, neutral active and acid active hyaluronidases can be selected. In a particular example, the hyaluronan-degrading enzyme for use in the compositions, combinations and methods herein is a soluble neutral active hyaluronidase.

[0391] Exemplary of a soluble hyaluronidase is PH20 from any species, such as any set forth in any of SEQ ID NOS: 1, 2, 11, 25, 27, 29-32, 63-65, 101-102 and 199-210, or truncated forms thereof lacking all or a portion of the C-terminal GPI anchor attachment signal sequence, so long as the hyaluronidase is soluble (secreted upon expression) and retains hyaluronidase activity. Also included among soluble hyaluronidases are allelic variants or other variants of any of SEQ ID NOS:1, 2, 11, 25, 27, 29-32, 63-65, 101-102 and 199-210, or truncated forms thereof. Allelic variants and other variants are known to one of skill in the art, and include polypeptides having 60%, 70%, 80%, 90%, 91%, 92%, 93%, 94%, 95%, 96%., 97%, 98%, 99% or more sequence identity to any of SEQ ID NOS: 1, 2, 11, 25, 27, 29-32, 63-65, 101-102 and 199-210, or truncated forms thereof. Amino acid variants include conservative and non-conservative mutations. It is understood that residues that are important or otherwise required for the activity of a hyaluronidase, such as any described above or known to skill in the art, are generally invariant and cannot be changed. These include, for example, active site residues. Thus, for example, amino acid residues 111, 113 and 176 (corresponding to residues in the mature PH20 polypeptide set forth in SEQ ID NO:2) of a human PH20 polypeptide, or soluble form thereof, are generally invariant and are not altered. Other residues that confer glycosylation and formation of disulfide bonds required for proper folding also can be invariant.

[0392] In some instances, the soluble hyaluronan-degrading enzyme is normally GPI-anchored (such as, for example, human PH20) and is rendered soluble by truncation at the C-terminus. Such truncation can remove all of the GPI anchor attachment signal sequence, or can remove only some of the GPI anchor attachment signal sequence. The resulting polypeptide, however, is soluble. In instances where the soluble hyaluronan-degrading enzyme retains a portion of the GPI anchor attachment signal sequence, 1, 2, 3, 4, 5, 6, 7 or more amino acid residues in the GPI-anchor attachment signal sequence can be retained, provided the polypeptide is soluble. Polypeptides containing one or more amino acids of the GPI anchor are termed extended soluble hyaluronan-degrading enzymes. One of skill in the art can determine whether a polypeptide is GPI-anchored using methods well known in the art. Such methods include, but are not limited to, using known algorithms to predict the presence and location of the GPI-anchor attachment signal sequence and co-site, and performing solubility analyses before and after digestion with phosphatidylinositol-specific phospholipase C(PI-PLC) or D (PI-PLD).

[0393] Extended soluble hyaluronan-degrading enzymes can be produced by making C-terminal truncations to any naturally GPI-anchored hyaluronan-degrading enzyme such that the resulting polypeptide is soluble and contains one or more amino acid residues from the GPI-anchor attachment signal sequence (see, e.g., U.S. Published Pat. Appl. No. US20100143457). Exemplary extended soluble hyaluronan-degrading enzymes that are C-terminally truncated but retain a portion of the GPI anchor attachment signal sequence include, but are not limited to, extended soluble PH20 (esPH20) polypeptides of primate origin, such as, for example, human and chimpanzee esPH20 polypeptides. For example, the esPH20 polypeptides can be made by C-terminal truncation of any of the mature or precursor polypeptides set forth in SEQ ID NOS:1, 2 or 101, or allelic or other variation thereof, including active fragment thereof, wherein the resulting polypeptide is soluble and retains one or more amino acid residues from the GPI-anchor attachment signal sequence. Allelic variants and other variants are known to one of skill in the art, and include polypeptides having 60%, 70%, 80%, 90%, 91%, 92%, 93%, 94%, 95% or more sequence identity to any of SEQ ID NOS: 1 or 2. The esPH20 polypeptides provided herein can be C-terminally truncated by 1, 2, 3, 4, 5, 6, 7, 8, 9, 10 or more amino acids compared to the wild type polypeptide, such as a polypeptide with a sequence set forth in SEQ ID NOS: 1, 2 or 101, provided the resulting esPH20 polypeptide is soluble and retains 1 or more amino acid residues from the GPI-anchor attachment signal sequence.

[0394] Typically, for use in the compositions, combinations and methods herein, a soluble human hylauronan degrading enzyme, such as a soluble human PH20, is used. Although hylauronan degrading enzymes, such as PH20, from other animals can be utilized, such preparations are potentially immunogenic, since they are animal proteins. For example, a significant proportion of patients demonstrate prior sensitization secondary to ingested foods, and since these are animal proteins, all patients have a risk of subsequent sensitization. Thus, non-human preparations may not be suitable for chronic use. If non-human preparations are desired, it is contemplated herein that such polypeptides can be prepared to have reduced immunogenicity. Such modifications are within the level of one of skill in the art and can include, for example, removal and/or replacement of one or more antigenic epitopes on the molecule.

[0395] Hyaluronan-degrading enzymes, including hyaluronidases (e.g., PH20), used in the methods herein can be recombinantly produced or can be purified or partially-purified from natural sources, such as, for example, from testes extracts. Methods for production of recombinant proteins, including recombinant hyaluronan-degrading enzymes, are provided elsewhere herein and are well known in the art.

[0396] a. Soluble Human PH20

[0397] Exemplary of a soluble hyaluronidase is soluble human PH20, Soluble forms of recombinant human PH20 have been produced and can be used in the compositions, combinations and methods described herein. The production of such soluble forms of PH20 is described in U.S. Published Patent Application Nos. US20040268425, US20050260186, US20060104968, US20100143457 and International PCT application No. WO2009111066. For example, soluble PH20 polypeptides, include C-terminally truncated variant polypeptides that include a sequence of amino acids in SEQ ID NO:1 or 2, or have at least 91%, 92%, 93%, 94%, 95%, 95%, 97%, 98% sequence identity to a sequence of amino acids included in SEQ ID NO:1 or 2, retain hyaluronidase activity and are soluble. Included among these polypeptides are soluble PH20 polypeptides that completely lack all or a portion of the GPI-anchor attachment signal sequence.

[0398] Also included are extended soluble PH20 (esPH20) polypeptides that contain at least one amino acid of the GPI anchor. Thus, instead of having a GPI-anchor covalently attached to the C-terminus of the protein in the ER and being anchored to the extracellular leaflet of the plasma membrane, these polypeptides are secreted and are soluble. C-terminally truncated PH20 polypeptides can be C-terminally truncated by 1, 2, 3, 4, 5, 6, 7, 8, 9, 10, 11, 12, 13, 14, 15, 16, 17, 18, 19, 20, 25, 30, 35, 40, 45, 50, 55, 60 or more amino acids compared to the full length wild type polypeptide, such as a full length wild type polypeptide with a sequence set forth in SEQ ID NOS:1 or 2, or allelic or species variants or other variants thereof.

[0399] For example, soluble forms include, but are not limited to, C-terminal truncated polypeptides of human PH20 set forth in SEQ ID NO:1 having a C-terminal amino acid residue 467, 468, 469, 470, 471, 472, 473, 474, 475, 476, 477, 478, 479, 480, 481, 482 and 483, 484, 485, 486, 487, 488, 489, 490, 491, 492, 493, 494, 495, 496, 497, 498, 499 or 500 of the sequence of amino acids set forth in SEQ ID NO:1, or polypeptides that exhibit at least 85% identity thereto. Soluble forms of human PH20 generally include those that contain amino acids 36-464 set forth in SEQ ID NO:1. For example, when expressed in mammalian cells, the 35 amino acid N-terminal signal sequence is cleaved during processing, and the mature form of the protein is secreted. Thus, the mature soluble polypeptides contain amino acids 36 to 467, 468, 469, 470, 471, 472, 473, 474, 475, 476, 477, 478, 479, 480, 481, 482 and 483 of SEQ ID NO:1. Table 3 provides non-limiting examples of exemplary C-terminally truncated PH20 polypeptides, including C-terminally truncated soluble PH20 polypeptides. In Table 3 below, the length (in amino acids) of the precursor and mature polypeptides, and the sequence identifier (SEQ ID NO) in which exemplary amino acid sequences of the precursor and mature polypeptides of the C-terminally truncated PH20 proteins are set forth, are provided. The wild-type PH20 polypeptide also is included in Table 3 for comparison. In particular, exemplary of soluble hyaluronidases are soluble human PH20 polypeptides that are 442, 443, 444, 445, 446 or 447 amino acids in length, such as set forth in any of SEQ ID NOS: 4-9, or allelic or species variants or other variants thereof.

TABLE 3
Exemplary C-terminally truncated PH20 polypeptides

| | Precursor | | Mature | |
|---|---|---|---|---|
| | (amino | Precursor | (amino | Mature |
| Polypeptide | acids) | SEQ ID NO | acids) | SEQ ID NO |
| wildtype | 509 | 1 | 474 | 2 |
| SPAM1-SILF | 500 | 139 | 465 | 183 |
| SPAM-VSIL | 499 | 106 | 464 | 150 |
| SPAM1-IVSI | 498 | 140 | 463 | 184 |
| SPAM1-FIVS | 497 | 107 | 462 | 151 |
| SPAM1-MFIV | 496 | 141 | 461 | 185 |
| SPAM1-TMFI | 495 | 108 | 460 | 152 |
| SPAM1-ATMF | 494 | 142 | 459 | 186 |
| SPAM1-SATM | 493 | 109 | 458 | 153 |
| SPAM1-LSAT | 492 | 143 | 457 | 187 |
| SPAM1-TLSA | 491 | 110 | 456 | 154 |
| SPAM1-PSTL | 489 | 111 | 454 | 155 |
| SPAM1-SPST | 488 | 144 | 453 | 188 |
| SPAM1-STLS | 490 | 112 | 455 | 156 |
| SPAM1-ASPS | 487 | 113 | 452 | 157 |
| SPAM1-NASP | 486 | 145 | 451 | 189 |
| SPAM1-YNAS | 485 | 114 | 450 | 158 |
| SPAM1-FYNA | 484 | 115 | 449 | 159 |
| SPAM1-IFYN | 483 | 46 | 448 | 48 |
| SPAM1-QIFY | 482 | 3 | 447 | 4 |
| SPAM1-PQIF | 481 | 45 | 446 | 5 |
| SPAM1-EPQI | 480 | 44 | 445 | 6 |
| SPAM1-EEPQ | 479 | 43 | 444 | 7 |
| SPAM1-TEEP | 478 | 42 | 443 | 8 |
| SPAM1-ETEE | 477 | 41 | 442 | 9 |
| SPAM1-METE | 476 | 116 | 441 | 160 |
| SPAM1-PMET | 475 | 117 | 440 | 161 |
| SPAM1-PPME | 474 | 118 | 439 | 162 |
| SPAM1-KPPM | 473 | 119 | 438 | 163 |
| SPAM1-LKPP | 472 | 120 | 437 | 164 |
| SPAM1-FLKP | 471 | 121 | 436 | 165 |
| SPAM1-AFLK | 470 | 122 | 435 | 166 |
| SPAM1-DAFL | 469 | 123 | 434 | 167 |
| SPAM1-IDAF | 468 | 124 | 433 | 168 |
| SPAM1-CIDA | 467 | 40 | 432 | 47 |
| SPAM1-VCID | 466 | 125 | 431 | 169 |
| SPAM1-GVCI | 465 | 126 | 430 | 170 |

[0400] Generally soluble forms of PH20 are produced using protein expression systems that facilitate correct N-glycosylation to ensure the polypeptide retains activity, since glycosylation is important for the catalytic activity and stability of hyaluronidases. Such cells include, for example Chinese Hamster Ovary (CHO) cells (e.g. DG44 CHO cells). Other C-terminally truncated PH20 polypeptides, including precursor and mature forms, are set forth in any of SEQ ID NOS: 103-105, 127-138, 146-149 and 171-182.

[0401] b. rHuPH20

[0402] Recombinant soluble forms of human PH20 have been generated and can be used in the compositions, combinations and methods provided herein. The generation of such soluble forms of recombinant human PH20 are described, for example, in U.S. Published Patent Application Nos. US20040268425; US 20050260186; US20060104968; US20100143457; and International PCT Appl. No. WO2009111066. Exemplary of such polypeptides are those generated by expression of a nucleic acid molecule encoding amino acids 1-482 (set forth in SEQ ID NO:3). Such an exemplary nucleic acid molecule is set forth in SEQ ID NO:49. Post translational processing removes the 35 amino acid signal sequence, leaving a 447 amino acid soluble recombinant human PH20 (SEQ ID NO:4). As produced in the culture medium there is heterogeneity at the C-terminus such that the product, designated rHuPH20, includes a mixture of species that can include any one or more of SEQ ID NOS. 4-9 in various abundance. Typically, rHuPH20 is produced in cells that facilitate correct N-glycosylation to retain activity, such as CHO cells (e.g. DG44 CHO cells). The specific activity of rHuPH20 is about 120,000 U/mg.

[0403] 4. Glycosylation of Hyaluronan-Degrading Enzymes

[0404] Glycosylation, including N- and O-linked glycosylation, of some hyaluronan-degrading enzymes, including hyaluronidases, can be important for their catalytic activity and stability. While altering the type of glycan modifying a glycoprotein can have dramatic affects on a protein's antigenicity, structural folding, solubility, and stability, most enzymes are not thought to require glycosylation for optimal enzyme activity. For some hyaluronidases, removal of N-linked glycosylation can result in near complete inactivation of the hyaluronidase activity. Thus, for such hyaluronidases, the presence of N-linked glycans is critical for generating an active enzyme.

[0405] N-linked oligosaccharides fall into several major types (oligomannose, complex, hybrid, sulfated), all of which have (Man)₃-GlcNAc-GlcNAc- cores attached via the amide nitrogen of Asn residues that fall within -Asn-Xaa-Thr/Ser-sequences (where Xaa is not Pro). Glycosylation at an -Asn-Xaa-Cys- site has been reported for coagulation protein C. In some instances, a hyaluronan-degrading enzyme, such as a hyaluronidase, can contain both N-glycosidic and β-glycosidic linkages. For example, PH20 has O-linked oligosaccharides as well as N-linked oligosaccharides. There are seven potential glycosylation sites, including N-linked glycosylation sites, at N82, N166, N235, N254, N368, N393, 5490 of human PH20 exemplified in SEQ ID NO: 1. Amino acid residues N82, N166 and N254 are occupied by complex type glycans whereas amino acid residues N368 and N393 are occupied by high mannose type glycans. Amino acid residue N235 is occupied by approximately 80% high mannose type glycans and 20% complex type glycans. As noted above, glycosylation at S490 is not required for hyaluronidase activity.

[0406] In some examples, the hyaluronan-degrading enzymes for use in the compositions, combinations and/or methods provided are glycosylated at one or all of the glycosylation sites. For example, for human PH20, or a soluble form thereof, 2, 3, 4, 5, or 6 of the N-glycosylation sites corresponding to amino acids N82, N166, N235, N254, N368, and N393 of SEQ ID NO: 1 are glycosylated. In some examples the hyaluronan-degrading enzymes are glycosylated at one or more native glycosylation sites. In other examples, the hyaluronan-degrading enzymes are modified at one or more non-native glycosylation sites to confer glycosylation of the polypeptide at one or more additional site. In such examples, attachment of additional sugar moieties can enhance the pharmacokinetic properties of the molecule, such as improved half-life and/or improved activity.

[0407] In other examples, the hyaluronan-degrading enzymes for use in the compositions, combinations and/or methods provided herein are partially deglycosylated (or N-partially glycosylated polypeptides). For example, partially deglycosylated soluble PH20 polypeptides that retain all or a portion of the hyaluronidase activity of a fully glycosylated hyaluronidase can be used in the compositions, combinations and/or methods provided herein. Exemplary partially deglycosylated hyalurodinases include soluble forms of a partially deglycosylated PH20 polypeptides from any species, such as any set forth in any of SEQ ID NOS: 1, 2, 11, 25, 27, 29-32, 63, 65, and 101-102, or allelic variants, truncated variants, or other variants thereof. Such variants are known to one of skill in the art, and include polypeptides having 60%, 70%, 80%, 90%, 91%, 92%, 93%, 94%, 95% or more sequence identity to any of SEQ ID NOS: 1, 2, 11, 25, 27, 29-32, 63, 65, and 101-102, or truncated forms thereof. The partially deglycosylated hyaluronidases provided herein also include hybrid, fusion and chimeric partially deglycosylated hyaluronidases, and partially deglycosylated hyaluronidase conjugates.

[0408] Glycosidases, or glycoside hydrolases, are enzymes that catalyze the hydrolysis of the glycosidic linkage to generate two smaller sugars. The major types of N-glycans in vertebrates include high mannose glycans, hybrid glycans and complex glycans. There are several glycosidases that result in only partial protein deglycosylation, including: EndoF1, which cleaves high mannose and hybrid type glycans; EndoF2, which cleaves biantennary complex type glycans; EndoF3, which cleaves biantennary and more branched complex glycans; and EndoH, which cleaves high mannose and hybrid type glycans. Treatment of a hyaluronan-degrading enzyme, such as a soluble hyaluronidase, such as a soluble PH20, with one or all of these glycosidases can result in only partial deglycosylation and, therefore, retention of hyaluronidase activity.

[0409] Partially deglycosylated hyaluronan-degrading enzymes, such as partially deglycosylated soluble hyaluronidases, can be produced by digestion with one or more glycosidases, generally a glycosidase that does not remove all N-glycans but only partially deglycosylates the protein. For example, treatment of PH20 (e.g. a recombinant PH20 designated rHuPH20) with one or all of the above glycosidases (e.g. EndoF1, EndoF2 and/or EndoF3) results in partial deglycosylation. These partially deglycosylated PH20 polypeptides can exhibit hyaluronidase enzymatic activity that is comparable to the fully glycosylated polypeptides. In contrast, treatment of PH20 with PNGaseF, a glycosidase that cleaves all N-glycans, results in complete removal of all N-glycans and thereby renders PH20 enzymatically inactive. Thus, although all N-linked glycosylation sites (such as, for example, those at amino acids N82, N166, N235, N254, N368, and N393 of human PH20, exemplified in SEQ ID NO: 1) can be glycosylated, treatment with one or more glycosidases can render the extent of glycosylation reduced compared to a hyaluronidase that is not digested with one or more glycosidases.

[0410] The partially deglycosylated hyaluronan-degrading enzymes, including partially deglycosylated soluble PH20 polypeptides, can have 10%, 20%, 30%, 40%, 50%, 60%, 70% or 80% of the level of glycosylation of a fully glycosylated polypeptide. In one example, 1, 2, 3, 4, 5 or 6 of the N-glycosylation sites corresponding to amino acids N82, N166, N235, N254, N368, and N393 of SEQ ID NO:1 are partially deglycosylated, such that they no longer contain high mannose or complex type glycans, but rather contain at least an N-acetylglucosamine moiety. In some examples, 1, 2 or 3 of the N-glycosylation sites corresponding to amino acids N82, N166 and N254 of SEQ ID NO:1 are deglycosylated, that is, they do not contain a sugar moiety. In other examples, 3, 4, 5, or 6 of the N-glycosylation sites corresponding to amino acids N82, N166, N235, N254, N368, and N393 of SEQ ID NO:1 are glycosylated. Glycosylated amino acid residues minimally contain an N-acetylglucosamine moiety. Typically, the partially deglyclosylated hyaluronan-degrading enzymes, including partially deglycosylated soluble PH20 polypeptides, exhibit hyaluronidase activity that is 10%, 20%, 30%, 40%, 50%, 60%, 70%, 80%, 90%, 100%, 110%, 120%, 130%, 140%, 150%, 200%, 300%, 400%, 500%, 1000% or more of the hyaluronidase activity exhibited by the fully glycosylated polypeptide.

[0411] 5. Modified (Polymer-Conjugated) Hyaluronan-Degrading Enzymes In one example, the provided compositions and combinations contain hyaluronan-degrading enzymes, in particular soluble hyaluronidases, that have been modified by conjugation to one or more polymeric molecules (polymer), typically to increase the half-life of the hyaluronan-degrading enzyme, for example, to promote prolonged/sustained treatment effects in a subject.

[0412] Covalent or other stable attachment (conjugation) of polymeric molecules, such as polyethylene glycol (PEGylation moiety (PEG)), to the hyaluronan-degrading enzymes, such as hyaluronidases, impart beneficial properties to the resulting hyaluronan-degrading enzyme-polymer composition. Such properties include improved biocompatibility, extension of protein (and enzymatic activity) half-life in the blood, cells and/or in other tissues within a subject, effective shielding of the protein from proteases and hydrolysis, improved biodistribution, enhanced pharmacokinetics and/or pharmacodynamics, and increased water solubility.

[0413] Exemplary polymers that can be conjugated to the hyaluronan-degrading enzyme, such as the hyaluronidase, include natural and synthetic homopolymers, such as polyols (i.e. poly-OH), polyamines (i.e. poly-NH₂) and polycarboxyl acids (i.e. poly-COOH), and further heteropolymers i.e. polymers comprising one or more different coupling groups e.g. a hydroxyl group and amine groups. Examples of suitable polymeric molecules include polymeric molecules selected from among polyalkylene oxides (PAO), such as polyalkylene glycols (PAG), including polypropylene glycols (PEG), methoxypolyethylene glycols (mPEG) and polypropylene glycols, PEG-glycidyl ethers (Epox-PEG), PEG-oxycarbonylimidazole (CDI-PEG), branched polyethylene glycols (PEGs), polyvinyl alcohol (PVA), polycarboxylates, polyvinylpyrrolidone, poly-D,L-amino acids, polyethylene-co-maleic acid anhydride, polystyrene-co-maleic acid anhydride, dextrans including carboxymethyl-dextrans, heparin, homologous albumin, celluloses, including methylcellulose, carboxymethylcellulose, ethylcellulose, hydroxyethylcellulose carboxyethylcellulose and hydroxypropylcellulose, hydrolysates of chitosan, starches such as hydroxyethyl-starches and hydroxypropyl-starches, glycogen, agaroses and derivatives thereof, guar gum, pullulan, inulin, xanthan gum, carrageenan, pectin, alginic acid hydrolysates and bio-polymers:

[0414] Typically, the polymers are polyalkylene oxides (PAO), such as polyethylene oxides, such as PEG, typically mPEG, which, in comparison to polysaccharides such as dextran and pullulan, have few reactive groups capable of cross-linking. Typically, the polymers are non-toxic polymeric molecules such as (m)polyethylene glycol (mPEG) which can be covalently conjugated to the hyaluronan-degrading enzyme, such as the hyaluronidase (e.g. to attachment groups on the protein's surface) using a relatively simple chemistry.

[0415] PEGylation of therapeutics has been reported to increase resistance to proteolysis, increase plasma half-life, and decrease antigenicity and immunogenicity. Examples of PEGylation methodologies are known in the art (see for example, Lu and Felix, Int. J. Peptide Protein Res., 43:127-138, 1994; Lu and Felix, Peptide Res., 6:142-6, 1993; Felix et al., Int. J. Peptide Res., 46:253-64, 1995; Benhar et al., J. Biol. Chem., 269: 13398-404, 1994; Brumeanu et al., J Immunol., 154:3088-95, 1995; see also, Caliceti et al. (2003) Adv. Drug Deliv. Rev. 55(10):1261-77 and Molineux (2003) Pharmacotherapy 23 (8 Pt 2):3S-8S). PEGylation also can be used in the delivery of nucleic acid molecules in vivo. For example, PEGylation of adenovirus can increase stability and gene transfer (see, e.g., Cheng et al. (2003) Pharm. Res. 20(9):1444-51).

[0416] Suitable polymeric molecules for attachment to the hyaluronan-degrading enzymes, including hyaluronidases, include, but are not limited to, polyethylene glycol (PEG) and PEG derivatives such as methoxy-polyethylene glycols (mPEG), PEG-glycidyl ethers (Epox-PEG), PEG-oxycarbonylimidazole (CDI-PEG), branched PEGs, and polyethylene oxide (PEO) (see e.g. Roberts et al., Advanced Drug Delivery Review (2002) 54: 459-476; Harris and Zalipsky, S (eds.) “Poly(ethylene glycol), Chemistry and Biological Applications” ACS Symposium Series 680, 1997; Mehvar et al., J. Pharm. Pharmaceut. Sci., 3(1):125-136, 2000; Harris, (2003) Nature Reviews Drug Discovery 2:214-221; and Tsubery, (2004) J. Biol. Chem. 279(37):38118-24). The polymeric molecule can be of a molecular weight typically ranging from about 3 kDa to about 60 kDa. In some embodiments the polymeric molecule that is conjugated to a protein, such as rHuPH20, has a molecular weight of 5, 10, 15, 20, 25, 30, 35, 40, 45, 50, 55, 60 or more than 60 kDa.

[0417] PEGylated Soluble Hyaluronan-Degrading Enzymes

[0418] The hyaluronan-degrading enzyme used in the methods, compositions and combinations herein can be a PEGylated hyaluronan-degrading enzyme, such as a PEGylated soluble hyaluronan-degrading enzyme. In one example, it is a PEGylated soluble hyaluronidase, e.g. PEGylated rHuPH20. Various methods of modifying polypeptides by covalently attaching (conjugating) a PEG or PEG derivative (i.e. “PEGylation”) are known in the art (see e.g., U.S. 2006/0104968; U.S. Pat. No. 5,672,662; U.S. Pat. No. 6,737,505; and U.S. 2004/0235734). Techniques for PEGylation include, but are not limited to, specialized linkers and coupling chemistries (see e.g., Harris, Adv. Drug Deliv. Rev. 54:459-476, 2002), attachment of multiple PEG moieties to a single conjugation site (such as via use of branched PEGs; see e.g., Veronese et al., Bioorg. Med. Chem. Lett. 12:177-180, 2002), site-specific PEGylation and/or mono-PEGylation (see e.g., Chapman et al., Nature Biotech. 17:780-783, 1999), and site-directed enzymatic PEGylation (see e.g., Sato, Adv. Drug Deliv. Rev., 54:487-504, 2002). Methods and techniques described in the art can produce proteins having 1, 2, 3, 4, 5, 6, 7, 8, 9, 10 or more than 10 PEG or PEG derivatives attached to a single protein molecule (see e.g., U.S. 2006/0104968).

[0419] Numerous reagents for PEGylation have been described in the art. Such reagents include, but are not limited to, N-hydroxysuccinimidyl (NHS) activated PEG, succinimidyl mPEG, mPEG₂-N-hydroxysuccinimide, mPEG succinimidyl alpha-methylbutanoate, mPEG succinimidyl propionate, mPEG succinimidyl butanoate, mPEG carboxymethyl 3-hydroxybutanoic acid succinimidyl ester, homobifunctional PEG-succinimidyl propionate, homobifunctional PEG propionaldehyde, homobifunctional PEG butyraldehyde, PEG maleimide, PEG hydrazide, p-nitrophenyl-carbonate PEG, mPEG-benzotriazole carbonate, propionaldehyde PEG, mPEG butryaldehyde, branched mPEG₂ butyraldehyde, mPEG acetyl, mPEG piperidone, mPEG methylketone, mPEG “linkerless” maleimide, mPEG vinyl sulfone, mPEG thiol, mPEG orthopyridylthioester, mPEG orthopyridyl disulfide, Fmoc-PEG-NHS, Boc-PEG-NHS, vinylsulfone PEG-NHS, acrylate PEG-NHS, fluorescein PEG-NHS, and biotin PEG-NHS (see e.g., Monfardini et al., Bioconjugate Chem. 6:62-69, 1995; Veronese et al., J. Bioactive Compatible Polymers 12:197-207, 1997; U.S. Pat. No. 5,672,662; U.S. Pat. No. 5,932,462; U.S. Pat. No. 6,495,659; U.S. Pat. No. 6,737,505; U.S. Pat. No. 4,002,531; U.S. Pat. No. 4,179,337; U.S. Pat. No. 5,122,614; U.S. Pat. No. 5,324,844; U.S. Pat. No. 5,446,090; U.S. Pat. No. 5,612,460; U.S. Pat. No. 5,643,575; U.S. Pat. No. 5,766,581; U.S. Pat. No. 5,795,569; U.S. Pat. No. 5,808,096; U.S. Pat. No. 5,900,461; U.S. Pat. No. 5,919,455; U.S. Pat. No. 5,985,263; U.S. Pat. No. 5,990,237; U.S. Pat. No. 6,113,906; U.S. Pat. No. 6,214,966; U.S. Pat. No. 6,258,351; U.S. Pat. No. 6,340,742; U.S. Pat. No. 6,413,507; U.S. Pat. No. 6,420,339; U.S. Pat. No. 6,437,025; U.S. Pat. No. 6,448,369; U.S. Pat. No. 6,461,802; U.S. Pat. No. 6,828,401; U.S. Pat. No. 6,858,736; U.S. 2001/0021763; U.S. 2001/0044526; U.S. 2001/0046481; U.S. 2002/0052430; U.S. 2002/0072573; U.S. 2002/0156047; U.S. 2003/0114647; U.S. 2003/0143596; U.S. 2003/0158333; U.S. 2003/0220447; U.S. 2004/0013637; US 2004/0235734; U.S. 2005/0114037; U.S. 2005/0171328; U.S. 2005/0209416; EP 01064951; EP 0822199; WO 00176640; WO0500360; WO 0002017; WO 0249673; WO 9428024; and WO 0187925).

### E. PHARMACEUTICAL COMPOSITIONS AND FORMULATIONS, DOSAGE AND ADMINISTRATION

[0420] Provided herein are compositions and combinations containing an organophosphorus bioscavenger and a hyaluronan-degrading enzyme. The compositions and combinations can be formulated into suitable pharmaceutical preparations, such as solutions and suspensions. Typically, the OP bioscavengers and hyaluronan-degrading enzymes are formulated into pharmaceutical compositions using techniques and procedures well known in the art (see e.g., Ansel Introduction to Pharmaceutical Dosage Forms, Fourth Edition, 1985, 126). The OP bioscavenger can be co-formulated or co-administered with the hyaluronan-degrading enzyme to treat organophosphorus poisoning. When co-administered, the hyaluronan-degrading enzyme can be administered prior to, simultaneously with or subsequent to the organophosphorus bioscavenger. Also provided herein are pharmaceutical compositions containing one or more additional agents used to treat organophosphorus poisoning. Exemplary of such agents are carbamates, anti-muscarinics, ChE-reactivators and anti-convulsives (see Section I below). The provided compositions and combinations of an organophosphorus bioscavenger and hyaluronan-degrading enzyme can be co-formulated or co-administered with pharmaceutical compositions of such second agents.

[0421] 1. Dosages and Formulations for Administration

[0422] In the compositions, combinations and methods provided herein, the organophosphorus bioscavenger and hyaluronan-degrading enzyme are administered in an amount to prevent, ameliorate or reduce both organophosphorus poisoning and side effects or adverse effects of organophosphorus poisoning. The compositions and combinations can be used in methods of treatment and uses for counteracting the effects of poisoning caused by OP compounds and nerve agents, including in prophylactic treatments. Pharmaceutical compositions of organophosphorus bioscavengers and hyaluronan-degrading enzymes can be administered by any suitable route of administration, including but not limited to orally, intravenously (IV), subcutaneously, intramuscularly, intra-tumorally, intradermally, topically, transdermally, rectally or sub-epidermally. Other routes of administration are contemplated, such as any route known to those of skill in the art.

[0423] The most suitable route in any given case depends on a variety of factors, such as the nature, progress and severity of the OP poisoning for which the composition is used. Typically, for purposes herein, the organophosphorus bioscavengers and hyaluronan-degrading enzymes are administered parenterally. These include, for example, subcutaneous and intramuscular routes of administration. Thus, in one example, local administration can be achieved by injection, such as from a syringe or other article of manufacture containing a injection device such as a needle. Other modes of administration also are contemplated. Pharmaceutical compositions can be formulated in dosage forms appropriate for each route of administration.

[0424] The organophosphorus bioscavenger can be administered sequentially, at the same time or in the same composition as hyaluronan-degrading enzyme. Compositions also can be administered with other biologically active second agents or treatments, such as carbamates, anti-muscarinics and ChE-reactivators, either sequentially, intermittently, at the same time or in the same composition. Administration also can include controlled release systems including controlled release formulations and device controlled release, such as by means of a pump.

[0425] Further, the concentration of the pharmaceutically active agent(s) can be adjusted so that administration provides an effective amount to produce the desired pharmacological effect. The exact dose depends on the age, weight and condition of the patient or animal as is known in the art. The unit-dose parenteral preparations are packaged in an ampoule, a vial or a syringe with a needle. The volume of liquid solution or reconstituted powder preparation, containing the pharmaceutically active agent(s), is a function of severity of the disease and the particular article of manufacture chosen for package. All preparations for parenteral administration must be sterile, as is known and practiced in the art.

[0426] Also, it is understood that the precise dosage and duration of treatment is a function of the organophosphorus poisoning and can be determined empirically using known testing protocols or by extrapolation from in vivo or in vitro test data. It is to be noted that concentrations and dosage values also can vary with the severity of the poisoning. It is to be further understood that for any particular subject, specific dosage regimens should be adjusted over time according to the individual need and the professional judgment of the person administering or supervising the administration of the compositions, and that the concentration ranges set forth herein are exemplary only and are not intended to limit the scope or use of compositions and combinations containing them. The compositions can be administered by the minute, hourly, daily, weekly, monthly, yearly or once. Generally, dosage regimens are chosen to limit toxicity. It should be noted that the attending physician would know how to and when to terminate, interrupt or adjust therapy to lower dosage due to toxicity, or bone marrow, liver or kidney or other tissue dysfunctions. Conversely, the attending physician would also know how to and when to adjust treatment to higher levels if the clinical response is not adequate (precluding toxic side effects).

[0427] The pharmaceutical compositions can be formulated in dosage forms appropriate for each route of administration. Pharmaceutically therapeutically active agents and derivatives thereof are typically formulated and administered in unit dosage forms or multiple dosage forms. Each unit dose contains a predetermined quantity of therapeutically active agent sufficient to produce the desired therapeutic effect, in association with the required pharmaceutical carrier, vehicle or diluent. Examples of unit dose forms include ampoules and syringes and individually packaged tablets or capsules. Unit dose forms can be administered in fractions or multiples thereof. A multiple dose form is a plurality of identical unit dosage forms packaged in a single container to be administered in segregated unit dose form. Examples of multiple dose forms include vials, bottles of tablets or capsules or bottles of pints or gallons. Hence, a multiple dose form is a multiple of unit doses that are not segregated in packaging. Generally, dosage forms or compositions containing active ingredient in the range of 0.005% to 100% with the balance made up from non-toxic carrier can be prepared. The therapeutic agent(s) can be formulated as pharmaceutical compositions for single or multiple dosage use.

[0428] Pharmaceutically acceptable compositions are prepared in view of approvals for a regulatory agency or other agency prepared in accordance with generally recognized pharmacopeia for use in animals and in humans. Compositions can take the form of solutions, suspensions, emulsion, tablets, pills, capsules, powders, and sustained release formulations. A composition can be formulated as a suppository, with traditional binders and carriers such as triglycerides. Oral formulation can include standard carriers such as pharmaceutical grades of mannitol, lactose, starch, magnesium stearate, sodium saccharine, cellulose, magnesium carbonate, and other such agents. The formulation should suit the mode of administration.

[0429] Pharmaceutical compositions can include carriers such as a diluent, adjuvant, excipient, or vehicle with which an enzyme is administered. Examples of suitable pharmaceutical carriers are described in “Remington's Pharmaceutical Sciences” by E. W. Martin. Such compositions will contain a therapeutically effective amount of the compound, generally in purified form, together with a suitable amount of carrier so as to provide the form for proper administration to the patient. Such pharmaceutical carriers can be sterile liquids, such as water and oils, including those of petroleum, animal, vegetable or synthetic origin, such as peanut oil, soybean oil, mineral oil, and sesame oil. Water is a typical carrier when the pharmaceutical composition is administered intravenously. Saline solutions and aqueous dextrose and glycerol solutions also can be employed as liquid carriers, particularly for injectable solutions. Compositions can contain along with an active ingredient: a diluent such as lactose, sucrose, dicalcium phosphate, or carboxymethylcellulose; a lubricant, such as magnesium stearate, calcium stearate and talc; and a binder such as starch, natural gums, such as gum acaciagelatin, glucose, molasses, polyvinylpyrrolidine, celluloses and derivatives thereof, povidone, crospovidones and other such binders known to those of skill in the art. Suitable pharmaceutical excipients include starch, glucose, lactose, sucrose, gelatin, malt, rice, flour, chalk, silica gel, sodium stearate, glycerol monostearate, talc, sodium chloride, dried skim milk, glycerol, propylene, glycol, water, and ethanol. A composition, if desired, also can contain minor amounts of wetting or emulsifying agents, or pH buffering agents, for example, acetate, sodium citrate, cyclodextrine derivatives, sorbitan monolaurate, triethanolamine sodium acetate, triethanolamine oleate, and other such agents.

[0430] Formulations are provided for administration to humans and animals in unit dosage forms, such as tablets, capsules, pills, powders, granules, sterile parenteral solutions or suspensions, and oral solutions or suspensions, and oil water emulsions containing suitable quantities of the compounds or pharmaceutically acceptable derivatives thereof. Pharmaceutically therapeutically active compounds and derivatives thereof are typically formulated and administered in unit dosage forms or multiple dosage forms. Each unit dose contains a predetermined quantity of therapeutically active compound sufficient to produce the desired therapeutic effect, in association with the required pharmaceutical carrier, vehicle or diluent. Examples of unit dose forms include ampoules and syringes and individually packaged tablets or capsules. Unit dose forms can be administered in fractions or multiples thereof. A multiple dose form is a plurality of identical unit dosage forms packaged in a single container to be administered in segregated unit dose form. Examples of multiple dose forms include vials, bottles of tablets or capsules or bottles of pints or gallons. Hence, multiple dose form is a multiple of unit doses that are not segregated in packaging. Generally, dosage forms or compositions containing active ingredient in the range of 0.005% to 100% with the balance made up from non-toxic carrier can be prepared.

[0431] The compositions and combinations provided herein of a hyaluronan-degrading enzyme and organophosphorus bioscavenger can be provided as a liquid or lyophilized formulation. Lyophilized formulations are ideal for long term storage of the combinations and compositions provided herein.

[0432] In one example, pharmaceutical preparation can be in liquid form, for example, solutions, syrups or suspensions. If provided in liquid form, the pharmaceutical preparation of OP bioscavenger (e.g. rBChE) and/or a hyaluronan-degrading enzyme, for example, can be provided as a concentrated preparation to be diluted to a therapeutically effective concentration. The hyaluronan-degrading enzyme and OP bioscavenger (e.g. rBCheE) co-formulation can be prepared and stored together or can be mized together immediately prior to administration. Alternatively, the hyaluronan-degrading enzyme an OP bioscavenger are prepared as separate formulations, and are administered simultaneously, intermittently or sequentially. Such liquid preparations can be prepared by conventional means with pharmaceutically acceptable additives such as suspending agents (e.g., sorbitol syrup, cellulose derivatives or hydrogenated edible fats); emulsifying agents (e.g., lecithin or acacia); non-aqueous vehicles (e.g., almond oil, oily esters, or fractionated vegetable oils); and preservatives (e.g., methyl or propyl-p-hydroxybenzoates or sorbic acid).

[0433] In another example, pharmaceutical preparations can be presented in lyophilized form for reconstitution with water or other suitable vehicle before use. For example, the pharmaceutical preparations of an OP bioscavenger (e.g. rBChE) and/or a hyaluronan-degrading enzyme can be reconstituted with a solution, generally a buffer or liquid solution.

[0434] Administration methods can be employed to decrease the exposure of organophosphorus bioscavengers and/or hyaluronan-degrading enzymes to degradative processes, such as proteolytic degradation and immunological intervention via antigenic and immunogenic responses. Examples of such methods include local administration at the site of treatment. PEGylation of therapeutics has been reported to increase resistance to proteolysis, increase plasma half-life, and decrease antigenicity and immunogenicity. Examples of PEGylation methodologies are known in the art (see for example, Lu and Felix, Int. J. Peptide Protein Res., 43: 127-138, 1994; Lu and Felix, Peptide Res., 6: 142-6, 1993; Felix et at, Int. J. Peptide Res., 46: 253-64, 1995; Benhar et al., J. Biol. Chem., 269: 13398-404, 1994; Brumeanu et al., J Immunol., 154: 3088-95, 1995; see also, Caliceti et al. (2003) Adv. Drug Deliv. Rev. 55(10):1261-77 and Molineux (2003) Pharmacotherapy 23 (8 Pt 2):3S-8S). PEGylation also can be used in the delivery of nucleic acid molecules in vivo. For example, PEGylation of adenovirus can increase stability and gene transfer (see, e.g., Cheng et al. (2003) Pharm. Res. 20(9): 1444-51).

[0435] a. Organophosphorus Bioscavengers

[0436] A selected organophosphorus bioscavenger, for example, a cholinesterase, e.g. rBChE, is included in an amount sufficient that exhibits a therapeutically useful effect. The composition containing the OP bioscavenger, hyaluronan-degrading enzyme, or both, can include a pharmaceutically acceptable carrier. A therapeutically effective concentration can be determined empirically by testing the compounds in known in vivo or in vitro systems, such as the assays provided herein. The concentration of a selected organophosphorus bioscavenger, for example rBChE, in the composition depends on absorption, inactivation and excretion rates, the physicochemical characteristics, the dosage schedule, and amount administered as well as other factors known to those of skill in the art. For example, it is understood that the precise dosage and duration of treatment is a function of the subject being treated and may be determined empirically using known testing protocols or by extrapolation from in vivo or in vitro test data. It is to be noted that concentrations and dosage values may also vary with the age of the individual treated. It is to be further understood that for any particular subject, specific dosage regimens should be adjusted over time according to the individual need and the professional judgment of the person administering or supervising the administration of the formulations, and that the concentration ranges set forth herein are exemplary only and are not intended to limit the scope thereof.

[0437] The amount of a selected organophosphorus bioscavenger, for example, rBChE, to be administered in the compositions and combinations provided herein for the treatment of organophosphorus poisoning, including pesticide poisoning or nerve agent poisoning, can be determined by standard clinical techniques. In addition, in vitro assays and animal models can be employed to help identify optimal dosage ranges. The precise dosage, which can be determined empirically, can depend on the particular OP bioscavenger, the organophosphorus compound and its method of administration, and the severity of the OP poisoning. OP bioscavengers in the compositions and combinations provided herein are formulated in an amount in a range between or between about 0.5 μg to 2000 mg, such as 1 μg to 1000 mg, for example, between or between about 1 μg to 100 mg, 1 μg to 1 mg, 1 mg to 1000 mg, 1 mg to 500 mg, 1 mg to 100 mg, 50 mg to 1000 mg, 250 mg to 1000 mg, or 250 mg to 750 mg, such as, for example, between or between about 1 μg to 100 mg, 1 μg to 50 mg, 1 μg to 25 mg, 1 μg to 10 mg, 1 μg to 1 mg, 1 μg to 500 μg, 1 μg to 250 μg, 1 μg to 100 μg, 1 μg to 50 μg, 50 μg to 100 mg, 50 μg to 25 mg, 50 μg to 10 mg, 50 μg to 1 mg, 50 μg to 500 μg, 50 μg to 250 μg, 50 μg to 100 μg, 100 μg to 100 mg, 100 μg to 50 mg, 100 μg to 25 mg, 100 μg to 10 mg, 100 μg to 1 mg, 100 μg to 500 μg, 100 μg to 250 μg, 250 μg to 100 mg, 250 μg to 50 mg, 250 μg to 25 mg, 250 μg to 10 mg, 250 μg to 1 mg, 250 μg to 500 μg, 500 μg to 100 mg, 500 μg to 50 mg, 500 μg to 25 mg, 500 μg to 10 mg, 500 μg to 1 mg, 1 mg to 500 mg, 1 mg to 250 mg, 1 mg to 150 mg, 1 mg to 100 mg, 1 mg to 75 mg, 1 mg to 50 mg, 25 mg to 500 mg, 25 mg to 250 mg, 25 mg to 150 mg, 25 mg to 100 mg, 25 mg to 75 mg, 25 mg to 50 mg, 50 mg to 750 mg, 50 mg to 500 mg, 50 mg to 250 mg, 50 mg to 150 mg, 50 mg to 100 mg, 100 mg to 1000 mg, 100 mg to 750 mg, 100 mg to 500 mg, 100 mg to 250, 250 mg to 1000 mg, 250 mg to 750 mg, 250 mg to 500 mg, 500 mg to 1000 mg, 500 mg to 750 mg, or can be at or about or at least 1 μg, 10 μg, 50 μg, 100 μg, 250 μg, 500 μg, 750 μg, 1 mg, 5 mg, 10 mg, 15 mg, 20 mg, 25 mg, 30 mg, 35 mg, 40 mg, 45 mg, 50 mg, 60 mg, 70 mg, 80 mg, 90 mg, 100 mg, 150 mg, 200 mg, 250 mg, 300 mg, 340 mg, 350 mg, 400 mg, 500 mg, 600 mg, 700 mg, 750 mg, 800 mg, 900 mg or 1000 mg or more. The particular amount depends on the organophosphorus bioscavenger. Higher dosage amounts can be provided for stoichiometric bioscavengers whereas lower doses can be provided for catalytic bioscavengers. The amount can be for direct administration. The amount in the composition can be for single dosage administration or multiple dosage administration.

[0438] For example, a catalytic bioscavenger in the compositions and combinations provided herein can be formulated for in an amount from between or between about 1 μg to 100 mg, for example, between or between about 1 μg to 50 mg, 1 μg to 1 mg, 1 μg to 500 μg, 250 μg to 1 mg, 500 μg to 1 mg, 500 μg to 10 mg, 500 μg to 50 mg, 1 mg to 100 mg, such as, for example, between or between about 1 μg to 100 mg, 1 μg to 50 mg, 1 μg to 25 mg, 1 μg to 10 mg, 1 μg to 1 mg, 1 μg to 500 μg, 1 μg to 250 μg, 1 μg to 100 μg, 1 μg to 50 μg, 50 μg to 100 mg, 50 μg to 25 mg, 50 μg to 10 mg, 50 μg to 1 mg, 50 μg to 500 μg, 50 μg to 250 μg, 50 μg to 100 μg, 100 μg to 100 mg, 100 μg to 50 mg, 100 μg to 25 mg, 100 μg to 10 mg, 100 μg to 1 mg, 100 μg to 500 μg, 100 μg to 250 μg, 250 μg to 100 mg, 250 μg to 50 mg, 250 μg to 25 mg, 250 μg to 10 mg, 250 μg to 1 mg, 250 μg to 500 μg, 500 μg to 100 mg, 500 μg to 50 mg, 500 μg to 25 mg, 500 μg to 10 mg, 500 μg to 1 mg, or can be at or about or at least 1 μg, 10 μg, 50 μg, 100 μg, 250 μg, 500 μg, 750 μg, 1 mg, 5 mg, 10 mg, 15 mg, 20 mg, 25 mg, 30 mg, 35 mg, 40 mg, 45 mg, 50 mg, 60 mg, 70 mg, 80 mg, 90 mg or 100 mg. The amount in the composition can be for single dosage administration or multiple dosage administration. The amount can be for direct administration.

[0439] In another example, a stoichiometric bioscavenger in the compositions and combinations provided herein can be formulated in a dosage amount from between or between about 1 mg to 1000 mg, for example, between or between about 1 mg to 1000 mg, 1 mg to 500 mg, 1 mg to 100 mg, 50 mg to 1000 mg, 250 mg to 1000 mg, or 250 mg to 750 mg, such as, for example, between or between about 1 mg to 500 mg, 1 mg to 250 mg, 1 mg to 150 mg, 1 mg to 100 mg, 1 mg to 75 mg, 1 mg to 50 mg, 25 mg to 500 mg, 25 mg to 250 mg, 25 mg to 150 mg, 25 mg to 100 mg, 25 mg to 75 mg, 25 mg to 50 mg, 50 mg to 750 mg, 50 mg to 500 mg, 50 mg to 250 mg, 50 mg to 150 mg, 50 mg to 100 mg, 100 mg to 1000 mg, 100 mg to 750 mg, 100 mg to 500 mg, 100 mg to 250, 250 mg to 1000 mg, 250 mg to 750 mg, 250 mg to 500 mg, 500 mg to 1000 mg, 500 mg to 750 mg, or can be at or about or at least 1 mg, 5 mg, 10 mg, 15 mg, 20 mg, 25 mg, 30 mg, 35 mg, 40 mg, 45 mg, 50 mg, 60 mg, 70 mg, 80 mg, 90 mg, 100 mg, 150 mg, 200 mg, 250 mg, 300 mg, 340 mg, 350 mg, 400 mg, 500 mg, 600 mg, 700 mg, 750 mg, 800 mg, 900 mg or 1000 mg or more. The amount in the composition can be for single dosage administration or multiple dosage administration. The amount can be for direct administration.

[0440] The particular dosage and formulation thereof depends upon the indication and individual. If necessary dosages can be empirically determined. Typically any of compositions above are formulated in a volume of 0.1-100 ml, particularly, 0.1-10 mL, 0.1-5 mL, 0.1-3 mL, 0.1-1 mL, 1-10 mL, 3-5 mL, 3-10 mL, 5-10 mL, 1-50 mL, 10-50 mL, 10-30 mL, 1-20 mL, 1-5 mL, 1-3 mL, 2 to 8 mL, 4 to 7 mL or 4 to 5 mL volumes following reconstitution, such as by addition of an appropriate buffer. Typically, such dosage amounts are from at or about 50 mg to 1000 mg, generally 250 mg to 750 mg, in a 0.1 to 10 mL final volume. Hence, the concentration of organophosphorus bioscavenger present in a composition can be between 1 μg/mL to 10,000 mg/mL, such as from or from about 1 μg/mL to 1000 μg/mL, 1 to 500 μg/mL, 1 to 250 μg/mL, 1 to 100 μg/mL, 50 to 1000 μg/mL, 50 to 750 μg/mL, 50 to 500 μg/mL, 50 to 250 μg/mL, 100 to 1000 μg/mL, 100 to 500 μg/mL, 100 to 250 μg/mL, 250 to 1000 μg/mL, 250 to 750 μg/mL, 250 to 500 μg/mL, 500 to 1000 μg/mL, 0.5 to 50 mg/mL, 0.5 to 10 mg/mL, 0.5 to 1 mg/mL, 1 to 100 mg/mL, 1 to 50 mg/mL, 1 to 25 mg/mL, 1 to 1000 mg/mL, 1 to 500 mg/mL, 1 to 250 mg/mL, 10 to 500 mg/mL, 10 to 250 mg/mL, 10 to 150 mg/mL, 10 to 100 mg/mL, 10 to 50 mg/mL, 50 to 1500 mg/mL, 50 to 1000 mg/mL, 50 to 750 mg/mL, 50 to 500 mg/mL, 50 to 250 mg/mL, 100 to 1500 mg/mL, 100 to 1000 mg/mL, 100 to 750 mg/mL, 100 to 500 mg/mL, 100 to 7500 mg/mL, 100 to 5000 mg/mL, 100 to 2500 mg/mL, 500 to 10000 mg/mL, 500 to 7500 mg/mL, 500 to 5000 mg/mL, 500 to 2500 mg/mL, or 500 to 1000 mg/mL.

[0441] A organophosphorus bioscavenger, for example rBChE, can be administered at once, or can be divided into a number of smaller doses to be administered at intervals of time. Selected OP bioscavengers, for example rBChE, can be administered in one or more doses over the course of a treatment time for example over several minutes, hours, days, weeks, or months. In some cases, continuous administration is useful. It is understood that the precise dosage and course of administration depends on the particular subject and methods.

[0442] b. Hyaluronan-Degrading Enzymes

[0443] A selected hyaluronan-degrading enzyme, for example, a hyaluronidase, e.g. rHuPH20, is included in an amount sufficient that exhibits a therapeutically useful effect. The composition containing the OP bioscavenger, hyaluronan-degrading enzyme, or both, can include a pharmaceutically acceptable carrier. A therapeutically effective concentration can be determined empirically by testing the compounds in known in vivo or in vitro systems, such as the assays provided herein.

[0444] The amount of a selected hyaluronan-degrading enzyme, for example, rHuPH20, to be administered in the compositions and combinations provided herein for the treatment of organophosphorus poisoning, including pesticide poisoning or nerve agent poisoning, can be determined by standard clinical techniques. In addition, the therapeutically effective concentration can be determined empirically by testing the polypeptides in known in vitro and in vivo systems such as by using the assays provided herein or known in the art (see e.g., Taliani et al. (1996) Anal. Biochem., 240: 60-67; Filocamo et al. (1997) J Virology, 71: 1417-1427; Sudo et al. (1996) Antiviral Res. 32: 9-18; Buffard et al. (1995) Virology, 209:52-59; Bianchi et al. (1996) Anal. Biochem., 237: 239-244; Hamatake et al. (1996) Intervirology 39:249-258; Steinkuhler et al. (1998) Biochem., 37:8899-8905; D'Souza et al. (1995) J. Gen. Virol., 76:1729-1736; Takeshita et al. (1997) Anal. Biochem., 247:242-246; see also e.g, Shimizu et al. (1994) J. Virol. 68:8406-8408; Mizutani et al. (1996) J. Virol. 70:7219-7223; Mizutani et al. (1996) Biochem. Biophys. Res. Commun., 227:822-826; Lu et al. (1996) Proc. Natl. Acad. Sci. (USA), 93:1412-1417; Hahm et al., (1996) Virology, 226:318-326; Ito et al. (1996) J. Gen. Virol., 77:1043-1054; Mizutani et al. (1995) Biochem. Biophys. Res. Commun., 212:906-911; Cho et al. (1997) J. Virol. Meth. 65:201-207 and then extrapolated therefrom for dosages for humans.

[0445] For example, a hyaluronan-degrading enzyme in a composition or combination provided herein can be formulated at an amount between or between about 0.5 μg to 1000 mg, such as 100 μg to 1 mg, 1 mg to 20 mg or 1 mg to 100 mg, for example, 100 μg to 5 mg, 0.5 μg to 1450 μg, 1 μg to 1000 μg, 5 μg to 1250 μg, 10 μg to 750 μg, 50 μg to 500 μg, 0.5 μg to 500 μg, 500 μg to 1450 μg, 1 mg to 500 mg, 1 mg to 250 mg, 1 mg to 100 mg, 1 mg to 50 mg, 10 mg to 500 mg, 10 mg to 250 mg, 10 mg to 100 mg, 10 mg to 50 mg, 25 mg to 500 mg, 25 mg to 250 mg, 25 mg to 100 mg, 25 mg to 50 mg, 50 mg to 1000 mg; 50 mg to 500 mg, 50 mg to 250 mg, 50 mg to 100 mg, 100 mg to 1000 mg, 100 mg to 500 mg, 100 mg to 250 mg, 250 mg to 1000 mg, 250 mg to 500 mg, or 500 mg to 1000 mg, or is at least or least about or is 10 μg, 50 μg, 100 μg, 200 μg, 300 μg, 400 μg, 500 μg, 600 μg, 700 μg, 800 μg, 900 μg, 1 mg, 5 mg, 10 mg, 25 mg, 50 mg, 100 mg, 150 mg, 250 mg, 500 mg or 1000 mg or more. The amount in the composition can be for single dosage administration or multiple dosage administration. The amount can be for direct administration.

[0446] For example, an exemplary rHuPH20 preparation exhibits a specific activity of 120,000 Units/mg, while a PEGylated form of rHuPH20 exhibits a specific activity of at or about 18,000 and at or about 45,000 U/mg, such as about or at least 32,000 Units/mg.

[0447] Hence, in examples herein, a hyaluronan-degrading enzyme in a composition or combination provided herein can be formulated in a Unit amount. For example, a hyaluronan-degrading enzyme in a composition or combination provided herein can be formulated at an amount between or between about 10 to 50,000,000 Units, 10 to 40,000,000 Units, 10 to 36,000,000 Units, 10 to 12,000,000 Units, 10 to 1,200,000 Units, 10 to 1,000,000 Units, 10 to 500,000 Units, 100 to 100,000 Units, 500 to 50,000 Units, 1000 to 10,000 Units, 5000 to 7500 Units, 5000 Units to 50,000 Units, 1,000 to 10,000 Units, 10,000 Units to 6,000,000 Units, 10,000 U to 150,000 U, 10,000 U to 100,000 U, 10,000 U to 50,000 U, 50,000 U to 200,000 U, 50,000 U to 150,000 U, 50,000 U to 100,000 U, 10,000 U to 1,000,000 U, 50,000 U to 1,000,000 U, 500,000 U to 6,000,000 U, 500,000 U to 4,000,000 U, 500,000 U to 2,000,000 U, 500,000 U to 1,000,000 U, 1,000,000 U to 6,000,000 U, 1,000,000 U to 5,000,000 U, 1,000,000 U to 4,000,000 U, 1,000,000 U to 3,000,000 U, 1,000,000 U to 2,000,000 U, 2,000,000 U to 6,000,000 U, 2,000,000 U to 5,000,000 U, 2,000,000 U to 4,000,000 U, 2,000,000 U to 3,000,000 U, 3,000,000 U to 6,000,000 U, 4,000,000 U to 6,000,000 U, 5,000,000 U to 6,000,000 U, such as at least or least about or 1 Unit (U), 10 U, 50 U, 100 U, 500 U, 1,000 U, 5,000 U, 10,000 U, 20,000 U, 30,000 U, 40,000 U, 50,000 U, 60,000 U, 70,000 U, 80,000 U, 90,000 U, 100,000 U, 110,000 U, 120,000 U, 130,000 U, 140,000 U, 150,000 U, 160,000 U, 170,000 U, 180,000 U, 190,000 U, 200,000 U, 300,000 U, 400,000 U, 500,000 U, 600,000 U, 700,000 U, 800,000 U, 900,000 U, 1,000,000 U, 1,500,000 U, 2,000,000 U, 2,500,000 U, 3,000,000 U, 3,500,000 U, 4,000,000 U, 5,000,000 U, 6,000,000 U or more. The composition can be formulated for direct administration. The amount in the composition can be for single dosage administration or multiple dosage administration.

[0448] In some examples, dosages can be provided as a ratio to organophosphorus bioscavenger administered. For example, the hyaluronan-degrading enzyme can be administered at a ratio of hyaluronan-degrading enzyme:organophosphorus bioscavenger from between or between about 1:100 to 1:3,000, for example, at or about 1:100, 1:200, 1:300, 1:400, 1:500, 1:600, 1:700, 1:1:800, 1:900 1:1,000, 1:1, 100, 1:1,200, 1:1,300, 1:1,400, 1:1,500, 1:1,600, 1:1,700, 1:1,800, 1:1,900, 1:2,000, 1:2,100, 1:2,200, 1:2,300, 1:2,400, 1:2,500, 1:2,600, 1:2,700, 1:2,800, 1:2,900 or 1:3,000.

[0449] Typically any of the compostion s above are formulated in an amount to administer for indications described herein in a volume of 0.1-100 ml, particularly, 0.1-10 mL, 0.1-5 mL, 0.1-3 mL, 0.1-1 mL, 1-10 mL, 3-5 mL, 3-10 mL, 5-10 mL, 1-50 mL, 10-50 mL, 10-30 mL, 1-20 mL, 1-5 mL or 1-3 mL volumes. The hyaluronan-degrading enzyme (e.g. a hyaluronidase) can be provided in a composition at a concentration of from or from about 10 U/mL to 100,000 U/mL, 1000 U/mL to 50,000 U/ml, 5,000 U/mL to 20,000 U/mL, 10 U/mL to 10,000 U/mL, 10 U/mL to 5000 U/mL, or 50 U/mL to 15,000 U/mL, for example from or from about 10 U/mL to 500 U/mL, 50 U/mL to 1000 U/mL, 1000 U/mL to 15,000 U/mL, 100 U/mL to 5,000 U/mL, 500 U/mL to 5,000 U/mL, 100 U/mL to 750 U/mL, or 100 U/mL to 400 U/mL, for example at least or at least about or about or 50 U/mL, 100 U/mL, 150 U/mL, 200 U/mL, 400 U/mL, 500 U/mL, 1000 U/mL, 2000 Units/mL, 3000 U/mL, 4000 U/mL, 5000 U/mL, 6000 U/mL, 7000 U/mL, 8000 U/mL, 9000 U/mL, 10,000 U/mL, 11,000 U/mL, 12,000 U/mL, or 12,800 U/mL, or more. Generally the hyaluronan-degrading enzyme (e.g. a hyaluronidase) is present in a composition in a concentration that is at least or at least about or about 10 U/mL, 50 U/ml, 100 U/ml, 150 U/ml, 200 U/ml, 400 U/ml or 500 U/ml or can be provided in a more concentrated form, for example at least or at least about or about 1000 U/ml, 1500 Units/ml, 2000 U/ml, 4000 U/ml or 5000 U/ml for use directly or for dilution to the effective concentration prior to use.

[0450] For example, a hyaluronan-degrading enzyme in a composition for administration can be present in a concentration between or between about 0.5 μg to 5000 mg/mL, such as 0.5 mg/mL to 500 mg/mL, for example, between 0.5 mg/mL to 250 mg/mL, 0.5 mg/mL to 100 mg/mL, 0.5 mg/mL to 50 mg/mL, 0.5 mg/mL to 10 mg/mL, 1 mg/mL to 500 mg/mL, 1 mg/mL to 250 mg/mL, 1 mg/mL to 100 mg/mL, 1 mg/mL to 50 mg/mL, 50 mg/mL to 500 mg/mL, 50 mg/mL to 250 mg/mL, 50 mg/mL to 100 mg/mL, 100 mg/mL to 500 mg/mL, 100 mg/mL to 250 mg/mL or 250 mg/mL to 500 mg/mL, or is at least or least about or is 0.5 mg/mL, 1 mg/mL, 10 mg/mL, 20 mg/mL, 30 mg/mL, 40 mg/mL, 50 mg/mL, 60 mg/mL, 70 mg/mL, 80 mg/mL, 90 mg/mL, 100 mg/mL, 150 mg/mL, 200 mg/mL, 250 mg/mL, 300 mg/mL, 400 mg/mL or 500 mg/mL. The composition can be for single dosage administration or multiple dosage administration.

[0451] A hyaluronan-degrading enzyme, for example a PH20 (e.g. rHuPH20), can be administered at once, or can be divided into a number of smaller doses to be administered at intervals of time. The hyaluronan-degrading enzyme can be administered in one or more doses over the course of a treatment time for example over several minutes, hours, days, weeks, or months. In some cases, continuous administration is useful. It is understood that the precise dosage and course of administration depends on the particular subject and methods.

[0452] For practice of the methods described herein, the hyaluronan-degrading enzyme in a composition or combination provided herein can be administered at an amount between or between about 1 Units/kg to 800,00 Units/kg, 10 Units/kg to 10,000 Units/kg, 100 Units/kg to 10,000 Units/kg, for example, between 1 Unit/kg to 1000 Units/kg, 1 Units/kg to 500 Units/kg or 10 Units/kg to 50 Units/kg, 100 U/kg to 5,000 U/kg, 100 U/kg to 2,500 U/kg, 100 U/kg to 1000 U/kg, 100 U/kg to 500 U/kg, 500 U/kg to 10,000 U/kg, 500 U/kg to 5,000 U/kg, 500 U/kg to 1000 U/kg, 750 U/kg to 5,000 U/kg, 750 U/kg to 2,500 U/kg, 1000 U/kg to 10,000 U/kg, 1000 U/kg to 5,000 U/kg, 1000 to 2,500 U/kg, 1000 U/kg to 2,000 U/kg, 1,500 U/kg to 5,000 U/kg, 1,500 U/kg to 2,500 U/kg, or 1,500 U/kg to 2,000 U/kg, or at least or at least about or 1 U/kg, 10 U/kg, 100 U/kg, 250 U/kg, 500 U/kg, 1000 U/kg, 1,250 U/kg, 1,500 U/kg, 1,750 U/kg, 2,000 U/kg, 2,100 U/kg, 2,200 U/kg, 2,300 U/kg, 2,400 U/kg, 2,500 U/kg, 3,000 U/kg, 4,000 U/kg, 5,000 U/kg, 7,500 U/kg or 1000 U/kg or more.

[0453] 2. Injectables, Solutions and Emulsions

[0454] Parenteral administration, generally characterized by injection, either subcutaneously or intramuscularly is contemplated herein. Injectables can be prepared in conventional forms, either as liquid solutions or suspensions, solid forms suitable for solution or suspension in liquid prior to injection, or as emulsions. Suitable excipients are, for example, water, saline, dextrose, glycerol or ethanol. The pharmaceutical compositions also may contain other minor amounts of non-toxic auxiliary substances such as wetting or emulsifying agents, pH buffering agents, stabilizers, solubility enhancers, and other such agents, such as for example, sodium acetate, sorbitan monolaurate, triethanolamine oleate and cyclodextrins. Implantation of a slow-release or sustained-release system, such that a constant level of dosage is maintained (see, e.g., U.S. Pat. No. 3,710,795) is also contemplated herein. The percentage of active compound contained in such parenteral compositions is highly dependent on the specific nature thereof, as well as the activity of the compound and the needs of the subject.

[0455] Parenteral administration of the compositions generally includes sub-epidermal routes of administration such as subcutaneous and intramuscular administrations. If desired, intravenous administration also is contemplated. Injectables are designed for local and systemic administration. For purposes herein, local administration is desired for direct administration to the affected interstitium. Preparations for parenteral administration include sterile solutions ready for injection, sterile dry soluble products, such as lyophilized powders, ready to be combined with a solvent just prior to use, including hypodermic tablets, sterile suspensions ready for injection, sterile dry insoluble products ready to be combined with a vehicle just prior to use and sterile emulsions. The solutions may be either aqueous or nonaqueous. If administered intravenously, suitable carriers include physiological saline or phosphate buffered saline (PBS), and solutions containing thickening and solubilizing agents, such as glucose, polyethylene glycol, and polypropylene glycol and mixtures thereof.

[0456] Pharmaceutically acceptable carriers used in parenteral preparations include aqueous vehicles, nonaqueous vehicles, antimicrobial agents, isotonic agents, buffers, antioxidants, local anesthetics, suspending and dispersing agents, emulsifying agents, sequestering or chelating agents and other pharmaceutically acceptable substances. Examples of aqueous vehicles include Sodium Chloride Injection, Ringers Injection, Isotonic Dextrose Injection, Sterile Water Injection, Dextrose and Lactated Ringers Injection. Nonaqueous parenteral vehicles include fixed oils of vegetable origin, cottonseed oil, corn oil, sesame oil and peanut oil. Antimicrobial agents in bacteriostatic or fungistatic concentrations can be added to parenteral preparations packaged in multiple-dose containers, which include phenols or cresols, mercurials, benzyl alcohol, chlorobutanol, methyl and propyl p-hydroxybenzoic acid esters, thimerosal, benzalkonium chloride and benzethonium chloride. Isotonic agents include sodium chloride and dextrose. Buffers include phosphate and citrate. Antioxidants include sodium bisulfate. Local anesthetics include procaine hydrochloride. Suspending and dispersing agents include sodium carboxymethylcelluose, hydroxypropyl methylcellulose and polyvinylpyrrolidone. Emulsifying agents include Polysorbate 80 (TWEEN 80). A sequestering or chelating agent of metal ions include EDTA. Pharmaceutical carriers also include ethyl alcohol, polyethylene glycol and propylene glycol for water miscible vehicles and sodium hydroxide, hydrochloric acid, citric acid or lactic acid for pH adjustment.

[0457] The concentration of the pharmaceutically active compound is adjusted so that an injection provides an effective amount to produce the desired pharmacological effect. The exact dose depends on the age, weight and condition of the patient or animal as is known in the art. The unit-dose parenteral preparations are packaged in an ampoule, a vial or a syringe with a needle. The volume of liquid solution or reconstituted powder preparation, containing the pharmaceutically active compound, is a function of the disease to be treated and the particular article of manufacture chosen for package. For example, for the treatment of organophosphorus poisoning, it is contemplated that for parenteral injection the injected volume is or is about 0.5 to 10 milliliters. All preparations for parenteral administration must be sterile, as is known and practiced in the art.

[0458] Lyophilized Powders

[0459] Of interest herein are lyophilized powders, which can be reconstituted for administration as solutions, emulsions and other mixtures. They may also be reconstituted and formulated as solids or gels.

[0460] The sterile, lyophilized powder is prepared by dissolving a compound of inactive enzyme in a buffer solution. The buffer solution may contain an excipient which improves the stability or other pharmacological component of the powder or reconstituted solution, prepared from the powder. Subsequent sterile filtration of the solution followed by lyophilization under standard conditions known to those of skill in the art provides the desired formulation. Briefly, the lyophilized powder is prepared by dissolving an excipient, such as dextrose, sorbital, fructose, corn syrup, xylitol, glycerin, glucose, sucrose or other suitable agent, in a suitable buffer, such as citrate, sodium or potassium phosphate or other such buffer known to those of skill in the art. Then, a selected enzyme is added to the resulting mixture, and stirred until it dissolves. The resulting mixture is sterile filtered or treated to remove particulates and to insure sterility, and apportioned into vials for lyophilization. Each vial will contain a single dosage (1-1000 mg, generally 250-750 mg, such as 500-750 mg) or multiple dosages of the compound. The lyophilized powder can be stored under appropriate conditions, such as at about 4° C. to room temperature.

[0461] Reconstitution of this lyophilized powder with a buffer solution provides a formulation for use in parenteral administration. The solution chosen for reconstitution can be any buffer. For reconstitution about 0.1 to 10 mL, preferably 0.5 to 10 mL, more preferably 0.5 to 5 mL of buffer or other suitable carrier is added. The precise amount depends upon the indication treated and selected compound. Such amount can be empirically determined.

[0462] 4. Compositions for Other Routes of Administration

[0463] Depending upon the condition treated other routes of administration, such as topical application, transdermal patches, oral and rectal administration are also contemplated herein. For example, pharmaceutical dosage forms for rectal administration are rectal suppositories, capsules and tablets for systemic effect. Rectal suppositories include solid bodies for insertion into the rectum which melt or soften at body temperature releasing one or more pharmacologically or therapeutically active ingredients. Pharmaceutically acceptable substances utilized in rectal suppositories are bases or vehicles and agents to raise the melting point. Examples of bases include cocoa butter (theobroma oil), glycerin-gelatin, carbowax (polyoxyethylene glycol) and appropriate mixtures of mono-, di-and triglycerides of fatty acids. Combinations of the various bases may be used. Agents to raise the melting point of suppositories include spermaceti and wax. Rectal suppositories may be prepared either by the compressed method or by molding. The typical weight of a rectal suppository is about 2 to 3 gm. Tablets and capsules for rectal administration are manufactured using the same pharmaceutically acceptable substance and by the same methods as for formulations for oral administration.

[0464] Formulations suitable for rectal administration can be provided as unit dose suppositories. These can be prepared by admixing the active compound with one or more conventional solid carriers, for example, cocoa butter, and then shaping the resulting mixture.

[0465] For oral administration, pharmaceutical compositions can take the form of, for example, tablets or capsules prepared by conventional means with pharmaceutically acceptable excipients such as binding agents (e.g., pregelatinized maize starch, polyvinyl pyrrolidone or hydroxypropyl methylcellulose); fillers (e.g., lactose, microcrystalline cellulose or calcium hydrogen phosphate); lubricants (e.g., magnesium stearate, talc or silica); disintegrants (e.g., potato starch or sodium starch glycolate); or wetting agents (e.g., sodium lauryl sulphate). The tablets can be coated by methods well-known in the art.

[0466] Formulations suitable for buccal (sublingual) administration include, for example, lozenges containing the active compound in a flavored base, usually sucrose and acacia or tragacanth; and pastilles containing the compound in an inert base such as gelatin and glycerin or sucrose and acacia.

[0467] Pharmaceutical compositions also can be administered by controlled release formulations and/or delivery devices (see, e.g., in U.S. Pat. Nos. 3,536,809; 3,598,123; 3,630,200; 3,845,770; 3,847,770; 3,916,899; 4,008,719; 4,687,610; 4,769,027; 5,059,595; 5,073,543; 5,120,548; 5,354,566; 5,591,767; 5,639,476; 5,674,533 and 5,733,566).

### F. METHODS OF PRODUCING NUCLEIC ACIDS ENCODING AN ORGANOPHOSPHORUS BIOSCAVENGER OR HYALURONAN-DEGRADING ENZYME AND POLYPEPTIDES THEREOF

[0468] Polypeptides of an organophosphorus bioscavenger, such as butyrylcholinesterase, or hyaluronan-degrading enzyme, such as a soluble hyaluronidase, set forth herein, can be obtained by methods well known in the art for protein purification and recombinant protein expression. Any method known to those of skill in the art for identification of nucleic acids that encode desired genes can be used. Any method available in the art can be used to obtain a full length (i.e., encompassing the entire coding region) cDNA or genomic DNA clone encoding a hyaluronan-degrading enzyme, such as from a cell or tissue source. Modified or variant organophosphorus bioscavengers and hyaluronan-degrading enzymes, can be engineered from a wildtype polypeptide, such as by site-directed mutagenesis.

[0469] Polypeptides can be cloned or isolated using any available methods known in the art for cloning and isolating nucleic acid molecules. Such methods include PCR amplification of nucleic acids and screening of libraries, including nucleic acid hybridization screening, antibody-based screening and activity-based screening.

[0470] Methods for amplification of nucleic acids can be used to isolate nucleic acid molecules encoding a desired polypeptide, including for example, polymerase chain reaction (PCR) methods. A nucleic acid containing material can be used as a starting material from which a desired polypeptide-encoding nucleic acid molecule can be isolated. For example, DNA and mRNA preparations, cell extracts, tissue extracts, fluid samples (e.g. blood, serum, saliva), samples from healthy and/or diseased subjects can be used in amplification methods. Nucleic acid libraries also can be used as a source of starting material. Primers can be designed to amplify a desired polypeptide. For example, primers can be designed based on expressed sequences from which a desired polypeptide is generated. Primers can be designed based on back-translation of a polypeptide amino acid sequence. Nucleic acid molecules generated by amplification can be sequenced and confirmed to encode a desired polypeptide.

[0471] Additional nucleotide sequences can be joined to a polypeptide-encoding nucleic acid molecule, including linker sequences containing restriction endonuclease sites for the purpose of cloning the synthetic gene into a vector, for example, a protein expression vector or a vector designed for the amplification of the core protein coding DNA sequences. Furthermore, additional nucleotide sequences specifying functional DNA elements can be operatively linked to a polypeptide-encoding nucleic acid molecule. Examples of such sequences include, but are not limited to, promoter sequences designed to facilitate intracellular protein expression, and secretion sequences, for example heterologous signal sequences, designed to facilitate protein secretion. Such sequences are known to those of skill in the art. Additional nucleotide residues sequences such as sequences of bases specifying protein binding regions also can be linked to enzyme-encoding nucleic acid molecules. Such regions include, but are not limited to, sequences of residues that facilitate or encode proteins that facilitate uptake of an enzyme into specific target cells, or otherwise alter pharmacokinetics of a product of a synthetic gene. For example, enzymes can be linked to PEG moieties.

[0472] In addition, tags or other moieties can be added, for example, to aid in detection or affinity purification of the polypeptide. For example, additional nucleotide residues sequences such as sequences of bases specifying an epitope tag or other detectable marker also can be linked to enzyme-encoding nucleic acid molecules. Exemplary of such sequences include nucleic acid sequences encoding a His tag (e.g., 6×His, HHHHHH; SEQ ID NO:54) or Flag Tag (DYKDDDDK; SEQ ID NO:55).

[0473] The identified and isolated nucleic acids can then be inserted into an appropriate cloning vector. A large number of vector-host systems known in the art can be used. Possible vectors include, but are not limited to, plasmids or modified viruses, but the vector system must be compatible with the host cell used. Such vectors include, but are not limited to, bacteriophages such as lambda derivatives, or plasmids such as pCMV4, pBR322 or pUC plasmid derivatives or the Bluescript vector (Stratagene, La Jolla, Calif.). Other expression vectors include the HZ24 expression vector exemplified herein. The insertion into a cloning vector can, for example, be accomplished by ligating the DNA fragment into a cloning vector which has complementary cohesive termini. Insertion can be effected using TOPO cloning vectors (Invitrogen, Carlsbad, Calif.). If the complementary restriction sites used to fragment the DNA are not present in the cloning vector, the ends of the DNA molecules can be enzymatically modified. Alternatively, any site desired can be produced by ligating nucleotide sequences (linkers) onto the DNA termini; these ligated linkers can contain specific chemically synthesized oligonucleotides encoding restriction endonuclease recognition sequences. In an alternative method, the cleaved vector and protein gene can be modified by homopolymeric tailing. Recombinant molecules can be introduced into host cells via, for example, transformation, transfection, infection, electroporation and sonoporation, so that many copies of the gene sequence are generated.

[0474] In specific embodiments, transformation of host cells with recombinant DNA molecules that incorporate the isolated protein gene, cDNA, or synthesized DNA sequence enables generation of multiple copies of the gene. Thus, the gene can be obtained in large quantities by growing transformants, isolating the recombinant DNA molecules from the transformants and, when necessary, retrieving the inserted gene from the isolated recombinant DNA.

[0475] 1. Vectors and Cells

[0476] For recombinant expression of one or more of the desired proteins, such as any organophosphorus bioscavenger or hyaluronan-degrading enzyme polypeptide described herein, the nucleic acid containing all or a portion of the nucleotide sequence encoding the protein can be inserted into an appropriate expression vector, i.e., a vector that contains the necessary elements for the transcription and translation of the inserted protein coding sequence. The necessary transcriptional and translational signals also can be supplied by the native promoter for enzyme genes, and/or their flanking regions.

[0477] Also provided are vectors that contain a nucleic acid encoding the enzyme. Cells containing the vectors also are provided. The cells include eukaryotic and prokaryotic cells, and the vectors are any suitable for use therein.

[0478] Prokaryotic and eukaryotic cells, including endothelial cells, containing the vectors are provided. Such cells include bacterial cells, yeast cells, fungal cells, Archea, plant cells, insect cells and animal cells. The cells are used to produce a protein thereof by growing the above-described cells under conditions whereby the encoded protein is expressed by the cell, and recovering the expressed protein. For purposes herein, for example, the enzyme can be secreted into the medium.

[0479] Provided are vectors that contain a sequence of nucleotides that encodes the organophosphorus bioscavenger or hyaluronan-degrading enzyme polypeptide, in some examples a butyrylcholinesterase or soluble hyaluronidase polypeptide, coupled to the native or heterologous signal sequence, as well as multiple copies thereof. The vectors can be selected for expression of the enzyme protein in the cell or such that the enzyme protein is expressed as a secreted protein.

[0480] A variety of host-vector systems can be used to express the protein coding sequence. These include but are not limited to mammalian cell systems infected with virus (e.g. vaccinia virus, adenovirus and other viruses); insect cell systems infected with virus (e.g. baculovirus); microorganisms such as yeast containing yeast vectors; or bacteria transformed with bacteriophage, DNA, plasmid DNA, or cosmid DNA. The expression elements of vectors vary in their strengths and specificities. Depending on the host-vector system used, any one of a number of suitable transcription and translation elements can be used.

[0481] Any methods known to those of skill in the art for the insertion of DNA fragments into a vector can be used to construct expression vectors containing a chimeric gene containing appropriate transcriptional/translational control signals and protein coding sequences. These methods can include in vitro recombinant DNA and synthetic techniques and in vivo recombinants (genetic recombination). Expression of nucleic acid sequences encoding protein, or domains, derivatives, fragments or homologs thereof, can be regulated by a second nucleic acid sequence so that the genes or fragments thereof are expressed in a host transformed with the recombinant DNA molecule(s). For example, expression of the proteins can be controlled by any promoter/enhancer known in the art. In a specific embodiment, the promoter is not native to the genes for a desired protein. Promoters which can be used include but are not limited to the SV40 early promoter (Bernoist and Chambon, Nature 290:304-310 (1981)), the promoter contained in the 3′ long terminal repeat of Rous sarcoma virus (Yamamoto et al. Cell 22:787-797 (1980)), the herpes thymidine kinase promoter (Wagner et al., Proc. Natl. Acad. Sci. USA 78:1441-1445 (1981)), the regulatory sequences of the metallothionein gene (Brinster et al., Nature 296:39-42 (1982)); prokaryotic expression vectors such as the β-lactamase promoter (Jay et al., (1981) Proc. Natl. Acad. Sci. USA 78:5543) or the tac promoter (DeBoer et al., Proc. Natl. Acad. Sci. USA 80:21-25 (1983)); see also “Useful Proteins from Recombinant Bacteria”: in Scientific American 242:79-94 (1980)); plant expression vectors containing the nopaline synthetase promoter (Herrara-Estrella et al., Nature 303:209-213 (1984)) or the cauliflower mosaic virus 35S RNA promoter (Garder et al., Nucleic Acids Res. 9:2871 (1981)), and the promoter of the photosynthetic enzyme ribulose bisphosphate carboxylase (Herrera-Estrella et al., Nature 310:115-120 (1984)); promoter elements from yeast and other fungi such as the Gal4 promoter, the alcohol dehydrogenase promoter, the phosphoglycerol kinase promoter, the alkaline phosphatase promoter, and the following animal transcriptional control regions that exhibit tissue specificity and have been used in transgenic animals: elastase I gene control region which is active in pancreatic acinar cells (Swift et al., Cell 38:639-646 (1984); Ornitz et al., Cold Spring Harbor Symp. Quant. Biol. 50:399-409 (1986); MacDonald, Hepatology 7:425-515 (1987)); insulin gene control region which is active in pancreatic beta cells (Hanahan et al., Nature 315:115-122 (1985)), immunoglobulin gene control region which is active in lymphoid cells (Grosschedl et al., Cell 38:647-658 (1984); Adams et al., Nature 318:533-538 (1985); Alexander et al., Mol. Cell. Biol. 7:1436-1444 (1987)), mouse mammary tumor virus control region which is active in testicular, breast, lymphoid and mast cells (Leder et al., Cell 45:485-495 (1986)), albumin gene control region which is active in liver (Pinckert et al., Genes and Devel. 1:268-276 (1987)), alpha-fetoprotein gene control region which is active in liver (Krumlauf et al., Mol. Cell. Biol. 5:1639-1648 (1985); Hammer et al., Science 235:53-58 1987)), alpha-1 antitrypsin gene control region which is active in liver (Kelsey et al., Genes and Devel. 1:161-171 (1987)), beta globin gene control region which is active in myeloid cells (Magram et al., Nature 315:338-340 (1985); Kollias et al., Cell 46:89-94 (1986)), myelin basic protein gene control region which is active in oligodendrocyte cells of the brain (Readhead et al., Cell 48:703-712 (1987)), myosin light chain-2 gene control region which is active in skeletal muscle (Shani, Nature 314:283-286 (1985)), and gonadotrophic releasing hormone gene control region which is active in gonadotrophs of the hypothalamus (Mason et al., Science 234:1372-1378 (1986)).

[0482] In a specific embodiment, a vector is used that contains a promoter operably linked to nucleic acids encoding a desired protein, or a domain, fragment, derivative or homolog, thereof, one or more origins of replication, and optionally, one or more selectable markers (e.g., an antibiotic resistance gene). Exemplary plasmid vectors for transformation of E. coli cells, include, for example, the pQE expression vectors (available from Qiagen, Valencia, Calif.; see also literature published by Qiagen describing the system). pQE vectors have a phage T5 promoter (recognized by E. coli RNA polymerase) and a double lac operator repression module to provide tightly regulated, high-level expression of recombinant proteins in E. coli, a synthetic ribosomal binding site (RBS II) for efficient translation, a 6×His tag coding sequence, t₀ and T1 transcriptional terminators, ColE1 origin of replication, and a beta-lactamase gene for conferring ampicillin resistance. The pQE vectors enable placement of a 6×His tag at either the N- or C-terminus of the recombinant protein. Such plasmids include pQE 32, pQE 30, and pQE 31 which provide multiple cloning sites for all three reading frames and provide for the expression of N-terminally 6×His-tagged proteins. Other exemplary plasmid vectors for transformation of E. coli cells, include, for example, the pET expression vectors (see, U.S. Pat. No. 4,952,496; available from Novagen, Madison, Wis.; see, also literature published by Novagen describing the system). Such plasmids include pET 11a, which contains the T71ac promoter, T7 terminator, the inducible E. coli lac operator, and the lac repressor gene; pET 12a-c, which contains the T7 promoter, T7 terminator, and the E. coli ompT secretion signal; and pET 15b and pET19b (Novagen, Madison, Wis.), which contain a His-Tag™ leader sequence for use in purification with a His column and a thrombin cleavage site that permits cleavage following purification over the column, the T7-lac promoter region and the T7 terminator.

[0483] Exemplary of a vector for mammalian cell expression, in particular of a hyaluronan-degrading enzyme, is the HZ24 expression vector. The HZ24 expression vector was derived from the pCI vector backbone (Promega). It contains DNA encoding the Beta-lactamase resistance gene (AmpR), an F1 origin of replication, a Cytomegalovirus immediate-early enhancer/promoter region (CMV), and an SV40 late polyadenylation signal (SV40). The expression vector also has an internal ribosome entry site (IRES) from the ECMV virus (Clontech) and the mouse dihydrofolate reductase (DHFR) gene.

[0484] 2. Expression

[0485] Organophosphorus bioscavengers and hyaluronan-degrading enzyme polypeptides, including butyrylcholinesterases and soluble hyaluronidase polypeptides, can be produced by any method known to those of skill in the art including in vivo and in vitro methods. Desired proteins can be expressed in any organism suitable to produce the required amounts and forms of the proteins, such as for example, needed for administration and treatment. Expression hosts include prokaryotic and eukaryotic organisms such as E. coli, yeast, plants, insect cells, mammalian cells, including human cell lines and transgenic animals. Expression hosts can differ in their protein production levels as well as the types of post-translational modifications that are present on the expressed proteins. The choice of expression host can be made based on these and other factors, such as regulatory and safety considerations, production costs and the need and methods for purification.

[0486] Many expression vectors are available and known to those of skill in the art and can be used for expression of proteins. The choice of expression vector will be influenced by the choice of host expression system. In general, expression vectors can include transcriptional promoters and optionally enhancers, translational signals, and transcriptional and translational termination signals. Expression vectors that are used for stable transformation typically have a selectable marker which allows selection and maintenance of the transformed cells. In some cases, an origin of replication can be used to amplify the copy number of the vector.

[0487] Organophosphorus bioscavengers and hyaluronan-degrading enzyme polypeptides, such as butyrylcholinesterases and soluble hyaluronidase polypeptides, also can be utilized or expressed as protein fusions. For example, an enzyme fusion can be generated to add additional functionality to an enzyme. Examples of enzyme fusion proteins include, but are not limited to, fusions of a signal sequence, a tag such as for localization, e.g. a his₆ tag or a myc tag, or a tag for purification, for example, a GST fusion, and a sequence for directing protein secretion and/or membrane association.

[0488] a. Prokaryotic Cells

[0489] Prokaryotes, especially E. coli, provide a system for producing large amounts of proteins. Transformation of E. coli is simple and rapid technique well known to those of skill in the art. Expression vectors for E. coli can contain inducible promoters, such promoters are useful for inducing high levels of protein expression and for expressing proteins that exhibit some toxicity to the host cells. Examples of inducible promoters include the lac promoter, the trp promoter, the hybrid tac promoter, the T7 and SP6 RNA promoters and the temperature regulated λPL promoter.

[0490] Proteins, such as any provided herein, can be expressed in the cytoplasmic environment of E. coli. The cytoplasm is a reducing environment and for some molecules, this can result in the formation of insoluble inclusion bodies. Reducing agents such as dithiothreitol and β-mercaptoethanol and denaturants, such as guanidine-HCl and urea can be used to resolubilize the proteins. An alternative approach is the expression of proteins in the periplasmic space of bacteria which provides an oxidizing environment and chaperonin-like and disulfide isomerases and can lead to the production of soluble protein. Typically, a leader sequence is fused to the protein to be expressed which directs the protein to the periplasm. The leader is then removed by signal peptidases inside the periplasm. Examples of periplasmic-targeting leader sequences include the pelB leader from the pectate lyase gene and the leader derived from the alkaline phosphatase gene. In some cases, periplasmic expression allows leakage of the expressed protein into the culture medium. The secretion of proteins allows quick and simple purification from the culture supernatant. Proteins that are not secreted can be obtained from the periplasm by osmotic lysis. Similar to cytoplasmic expression, in some cases proteins can become insoluble and denaturants and reducing agents can be used to facilitate solubilization and refolding. Temperature of induction and growth also can influence expression levels and solubility, typically temperatures between 25° C. and 37° C. are used. Typically, bacteria produce aglycosylated proteins. Thus, if proteins require glycosylation for function, glycosylation can be added in vitro after purification from host cells.

[0491] b. Yeast Cells

[0492] Yeasts such as Saccharomyces cerevisae, Schizosaccharomyces pombe, Yarrowia lipolytica, Kluyveromyces lactis and Pichia pastoris are well known yeast expression hosts that can be used for production of proteins, such as any described herein. Yeast can be transformed with episomal replicating vectors or by stable chromosomal integration by homologous recombination. Typically, inducible promoters are used to regulate gene expression. Examples of such promoters include GAL1, GAL7 and GAL5 and metallothionein promoters, such as CUP1, AOX1 or other Pichia or other yeast promoter. Expression vectors often include a selectable marker such as LEU2, TRP1, HIS3 and URA3 for selection and maintenance of the transformed DNA. Proteins expressed in yeast are often soluble. Co-expression with chaperonins such as Bip and protein disulfide isomerase can improve expression levels and solubility. Additionally, proteins expressed in yeast can be directed for secretion using secretion signal peptide fusions such as the yeast mating type alpha-factor secretion signal from Saccharomyces cerevisae and fusions with yeast cell surface proteins such as the Aga2p mating adhesion receptor or the Arxula adeninivorans glucoamylase. A protease cleavage site such as for the Kex-2 protease, can be engineered to remove the fused sequences from the expressed polypeptides as they exit the secretion pathway. Yeast also is capable of glycosylation at Asn-X-Ser/Thr motifs.

[0493] c. Insect Cells

[0494] Insect cells, particularly using baculovirus expression, are useful for expressing polypeptides such as organophosphorus bioscavengers and hyaluronidase polypeptides. Insect cells express high levels of protein and are capable of most of the post-translational modifications used by higher eukaryotes. Baculovirus have a restrictive host range which improves the safety and reduces regulatory concerns of eukaryotic expression. Typical expression vectors use a promoter for high level expression such as the polyhedrin promoter of baculovirus. Commonly used baculovirus systems include the baculoviruses such as Autographa californica nuclear polyhedrosis virus (AcNPV), and the Bombyx mori nuclear polyhedrosis virus (BmNPV) and an insect cell line such as Sf9 derived from Spodoptera frugiperda, Pseudaletia unipuncta (A7S) and Danaus plexippus (DpN1). For high-level expression, the nucleotide sequence of the molecule to be expressed is fused immediately downstream of the polyhedrin initiation codon of the virus. Mammalian secretion signals are accurately processed in insect cells and can be used to secrete the expressed protein into the culture medium. In addition, the cell lines Pseudaletia unipuncta (A7S) and Danaus plexippus (DpN1) produce proteins with glycosylation patterns similar to mammalian cell systems.

[0495] An alternative expression system in insect cells is the use of stably transformed cells. Cell lines such as the Schneider 2 (S2) and Kc cells (Drosophila melanogaster) and C7 cells (Aedes albopictus) can be used for expression. The Drosophila metallothionein promoter can be used to induce high levels of expression in the presence of heavy metal induction with cadmium or copper. Expression vectors are typically maintained by the use of selectable markers such as neomycin and hygromycin.

[0496] d. Mammalian Cells

[0497] Mammalian expression systems can be used to express proteins including organophosphorus bioscavengers and hyaluronan-degrading enzyme polypeptides, such as soluble hyaluronidase polypeptides. Expression constructs can be transferred to mammalian cells by viral infection such as adenovirus or by direct DNA transfer such as liposomes, calcium phosphate, DEAE-dextran and by physical means such as electroporation and microinjection. Expression vectors for mammalian cells typically include an mRNA cap site, a TATA box, a translational initiation sequence (Kozak consensus sequence) and polyadenylation elements. IRES elements also can be added to permit bicistronic expression with another gene, such as a selectable marker. Such vectors often include transcriptional promoter-enhancers for high-level expression, for example the SV40 promoter-enhancer, the human cytomegalovirus (CMV) promoter and the long terminal repeat of Rous sarcoma virus (RSV). These promoter-enhancers are active in many cell types. Tissue and cell-type promoters and enhancer regions also can be used for expression. Exemplary promoter/enhancer regions include, but are not limited to, those from genes such as elastase I, insulin, immunoglobulin, mouse mammary tumor virus, albumin, alpha fetoprotein, alpha 1 antitrypsin, beta globin, myelin basic protein, myosin light chain 2, and gonadotropic releasing hormone gene control. Selectable markers can be used to select for and maintain cells with the expression construct. Examples of selectable marker genes include, but are not limited to, hygromycin B phosphotransferase, adenosine deaminase, xanthine-guanine phosphoribosyl transferase, aminoglycoside phosphotransferase, dihydrofolate reductase (DHFR) and thymidine kinase. For example, expression can be performed in the presence of methotrexate to select for only those cells expressing the DHFR gene. Fusion with cell surface signaling molecules such as TCR-ζ and Fc_{ε}RI-γ can direct expression of the proteins in an active state on the cell surface.

[0498] Many cell lines are available for mammalian expression including mouse, rat human, monkey, chicken and hamster cells. Exemplary cell lines include but are not limited to CHO, Balb/3T3, HeLa, MT2, mouse NS0 (nonsecreting) and other myeloma cell lines, hybridoma and heterohybridoma cell lines, lymphocytes, fibroblasts, Sp2/0, COS, NIH3T3, HEK293, 293S, 2B8, and HKB cells. Cell lines also are available adapted to serum-free media which facilitates purification of secreted proteins from the cell culture media. Examples include CHO-S cells (Invitrogen, Carlsbad, Calif., cat #11619-012) and the serum free EBNA-1 cell line (Pham et al., (2003) Biotechnol: Bioeng. 84:332-342). Cell lines also are available that are adapted to grow in special mediums optimized for maximal expression. For example, DG44 CHO cells are adapted to grow in suspension culture in a chemically defined, animal product-free medium.

[0499] i. Generation of Transgenic Animals

[0500] Protocols for the generation of non-human transgenic mammals are well established in the art (see, for example, Transgenesis Techniques Murphy, et al., Eds., Human Press, Totowa, N.J. (1993); Genetic Engineering of Animals A. Puhler, Ed. VCH Verlagsgesellschaft, Weinheim, N.Y. (1993); and Transgenic Animals in Agriculture Murray, et al., eds. Oxford University Press). For example, efficient protocols are available for the production of transgenic mice (Manipulating the Mouse Embryo 2nd Edition Hogan, et al. Cold Spring Harbor Press (1994) and Mouse Genetics and Transgenics: A Practical Approach. Jackson and Abbott, eds. Oxford University Press (2000)), transgenic cows (U.S. Pat. No. 5,633,076), transgenic pigs (U.S. Pat. No. 6,271,436), and transgenic goats (U.S. Pat. No. 5,907,080). Non-limiting examples of such protocols are summarized below.

[0501] Transgenic animals can be generated using stably transfected host cells derived from in vitro transfection. Where said host cells are pluripotent or totipotent, such cells can be used in morula aggregation or blastocyst injection protocols to generate chimeric animals. Preferred pluripotent/totipotent stably transfected host cells include primoridal germ cells, embryonic stem cells, and embryonal carcinoma cells. In a morula aggregation protocol, stably transfected host cells are aggregated with non-transgenic morula-stage embryos. In a blastocyst injection protocol, stably transfected host cells are introduced into the blastocoelic cavity of a non-transgenic blastocyst-stage embryo. The aggregated or injected embryos are then transferred to a pseudopregnant recipient female for gestation and birth of chimeras. Chimeric animals in which the transgenic host cells have contributed to the germ line can be used in breeding schemes to generate non-chimeric offspring which are wholly transgenic.

[0502] In an alternative protocol, such stably transfected host cells can be used as nucleus donors for nuclear transfer into recipient oocytes (as per Wilmut, et al. (1997) Nature 385: 810-813). For nuclear transfer, the stably transfected host cells need not be pluripotent or totipotent. Thus, for example, stably transfected fetal fibroblasts can be used (e.g., Cibelli, et al. (1998) Science 280: 1256-8 and Keefer, et al. (2001) Biology of Reproduction 64:849-856). The recipient oocytes are preferrably enucleated prior to transfer. Following nuclear transfer, the oocyte is transferred to a pseudopregnant recipient female for gestation and birth. Such offspring will be wholly transgenic (that is, not chimeric).

[0503] In another alternative protocol, transgenic animals are generated by direct introduction of expression construct DNA into a recipient oocyte, zygote, or embryo. Such direct introduction can be achieved by pronuclear microinjection (Wang et al. (2002) Molecular Reproduction and Development 63:437-443), cytoplasmic microinjection (Page et al. (1995) Transgenic Res 4(6):353-360), retroviral infection (e.g., Lebkowski et al. (1988) Mol Cell Biol 8(10):3988-3996), or electroporation (“Molecular Cloning: A Laboratory Manual. Second Edition” by Sambrook, et al. Cold Spring Harbor Laboratory: 1989).

[0504] For microinjection and electroporation protocols, the introduced DNA should contain linear expression construct DNA, free of vector sequences, as prepared from the expression constructs of the invention. Following DNA introduction and any necessary in vitro culture, the oocyte, zygote, or embryo is transferred to a pseudopregnant recipient female for gestation and birth. Such offspring can or can not be chimeric, depending on the timing and efficiency of transgene integration. For example, if a single cell of a two-cell stage embryo is microinjected, the resultant animal will most likely be chimeric.

[0505] Transgenic animals containing two or more independent transgenes can be made by introducing two or more different expression constructs into host cells using any of the above described methods. The presence of the transgene in the genomic DNA of an animal, tissue, or cell of interest, as well as transgene copy number, can be confirmed by techniques well known in the art, including hybridization and PCR techniques.

[0506] Some of the transgensis protocols result in the production of chimeric animals. Chimeric animals in which the transgenic host cells have contributed to the tissue-type wherein the promoter of the expression construct is active (e.g., mammary gland for WAP promoter) can be used to characterize or isolate recombinant proteins. For example, where the transgenic host cells have contributed to the germ line, chimeras can be used in breeding schemes to generate non-chimeric offspring which are wholly transgenic.

[0507] Wholly transgenic offspring, whether generated directly by a transgensis protocol or by breeding of a chimeric animals, can be used for breeding purposes to maintain the transgenic line and to characterize or isolate recombinant proteins. Where transgene expression is driven by a urinary endothelium-specific promoter, urine of transgenic animals can be collected for purification and characterization of recombinant enzymes. Where transgene expression is driven by a mammary gland-specific promoter, lactation of the transgenic animals can be induced or maintained, where the resultant milk can be collected for purification and characterization of recombinant enzymes. For female transgenics, lactation can be induced by pregnancy or by administration of hormones. For male transgenics, lactation may be induced by administration of hormones (Ebert et al. (1994) Biotechnology 12:699-702). Lactation is maintained by continued collection of milk from a lactating transgenic.

[0508] e. Plants

[0509] Transgenic plant cells and plants can be used to express proteins such as any described herein. Expression constructs are typically transferred to plants using direct DNA transfer such as microprojectile bombardment and PEG-mediated transfer into protoplasts, and with agrobacterium-mediated transformation. Expression vectors can include promoter and enhancer sequences, transcriptional termination elements and translational control elements. Expression vectors and transformation techniques are usually divided between dicot hosts, such as Arabidopsis and tobacco, and monocot hosts, such as corn and rice. Examples of plant promoters used for expression include the cauliflower mosaic virus promoter, the nopaline synthetase promoter, the ribose bisphosphate carboxylase promoter and the ubiquitin and UBQ3 promoters. Selectable markers such as hygromycin, phosphomannose isomerase and neomycin phosphotransferase are often used to facilitate selection and maintenance of transformed cells. Transformed plant cells can be maintained in culture as cells, aggregates (callus tissue) or regenerated into whole plants. Transgenic plant cells also can include algae engineered to produce hyaluronidase polypeptides. Because plants have different glycosylation patterns than mammalian cells, this can influence the choice of protein produced in these hosts.

[0510] 3. Purification Techniques

[0511] Method for purification of polypeptides, including organophosphorus bioscavengers (e.g. butyrylcholinesterases) and hyaluronan-degrading enzyme polypeptides (e.g. soluble hyaluronidase polypeptides) or other proteins, from host cells will depend on the chosen host cells and expression systems. For secreted molecules, proteins are generally purified from the culture media after removing the cells. For intracellular expression, cells can be lysed and the proteins purified from the extract. When transgenic organisms such as transgenic plants and animals are used for expression, tissues or organs can be used as starting material to make a lysed cell extract. Additionally, transgenic animal production can include the production of polypeptides in milk or eggs, which can be collected, and if necessary, the proteins can be extracted and further purified using standard methods in the art.

[0512] Proteins, such as soluble hyaluronidase polypeptides, can be purified using standard protein purification techniques known in the art including but not limited to, SDS-PAGE, size fraction and size exclusion chromatography, ammonium sulfate precipitation and ionic exchange chromatography, such as anion exchange. Affinity purification techniques also can be utilized to improve the efficiency and purity of the preparations. For example, antibodies, receptors and other molecules that bind hyaluronidase enzymes can be used in affinity purification. Expression constructs also can be engineered to add an affinity tag to a protein such as a myc epitope, GST fusion or His₆ and affinity purified with myc antibody, glutathione resin and Ni-resin, respectively. Purity can be assessed by any method known in the art including gel electrophoresis and staining and spectrophotometric techniques. Purified rHuPH20 compositions, as provided herein, typically have a specific activity of at least 70,000 to 100,000 Units/mg, for example, about 120,000 Units/mg. The specific activity can vary upon modification, such as with a polymer.

[0513] 4. PEGylation

[0514] Polyethylene glycol (PEG) has been widely used in biomaterials, biotechnology and medicine primarily because PEG is a biocompatible, nontoxic, water-soluble polymer that is typically nonimmunogenic (Zhao and Harris, ACS Symposium Series 680: 458-72, 1997). In the area of drug delivery, PEG derivatives have been widely used in covalent attachment (i.e., “PEGylation”) to proteins to reduce immunogenicity, proteolysis and kidney clearance and to enhance solubility (Zalipsky, Adv. Drug Del. Rev. 16:157-82, 1995). Similarly, PEG has been attached to low molecular weight, relatively hydrophobic drugs to enhance solubility, reduce toxicity and alter biodistribution. Typically, PEGylated drugs are injected as solutions.

[0515] A closely related application is synthesis of crosslinked degradable PEG networks or formulations for use in drug delivery since much of the same chemistry used in design of degradable, soluble drug carriers can also be used in design of degradable gels (Sawhney et al., Macromolecules 26: 581-87, 1993). It also is known that intermacromolecular complexes can be formed by mixing solutions of two complementary polymers. Such complexes are generally stabilized by electrostatic interactions (polyanion-polycation) and/or hydrogen bonds (polyacid-polybase) between the polymers involved, and/or by hydrophobic interactions between the polymers in an aqueous surrounding (Krupers et al., Eur. Polym J. 32:785-790, 1996). For example, mixing solutions of polyacrylic acid (PAAc) and polyethylene oxide (PEO) under the proper conditions results in the formation of complexes based mostly on hydrogen bonding. Dissociation of these complexes at physiologic conditions has been used for delivery of free drugs (i.e., non-PEGylated). In addition, complexes of complementary polymers have been formed from both homopolymers and copolymers.

[0516] Numerous reagents for PEGylation have been described in the art. Such reagents include, but are not limited to, N-hydroxysuccinimidyl (NHS) activated PEG, succinimidyl mPEG, mPEG₂-N-hydroxysuccinimide, mPEG succinimidyl alpha-methylbutanoate, mPEG succinimidyl propionate, mPEG succinimidyl butanoate, mPEG carboxymethyl 3-hydroxybutanoic acid succinimidyl ester, homobifunctional PEG-succinimidyl propionate, homobifunctional PEG propionaldehyde, homobifunctional PEG butyraldehyde, PEG maleimide, PEG hydrazide, p-nitrophenyl-carbonate PEG, mPEG-benzotriazole carbonate, propionaldehyde PEG, mPEG butryaldehyde, branched mPEG₂ butyraldehyde, mPEG acetyl, mPEG piperidone, mPEG methylketone, mPEG “linkerless” maleimide, mPEG vinyl sulfone, mPEG thiol, mPEG orthopyridylthioester, mPEG orthopyridyl disulfide, Fmoc-PEG-NHS, Boc-PEG-NHS, vinylsulfone PEG-NHS, acrylate PEG-NHS, fluorescein PEG-NHS, and biotin PEG-NHS (see e.g., Monfardini et al., Bioconjugate Chem. 6:62-69, 1995; Veronese et al., J. Bioactive Compatible Polymers 12:197-207, 1997; U.S. Pat. No. 5,672,662; U.S. Pat. No. 5,932,462; U.S. Pat. No. 6,495,659; U.S. 6,737,505; U.S. Pat. No. 4,002,531; U.S. Pat. No. 4,179,337; U.S. Pat. No. 5,122,614; U.S. Pat. No. 5,324,844; U.S. Pat. No. 5,446,090; U.S. Pat. No. 5,612,460; U.S. Pat. No. 5,643,575; U.S. Pat. No. 5,766,581; U.S. Pat. No. 5,795,569; U.S. Pat. No. 5,808,096; U.S. Pat. No. 5,900,461; U.S. Pat. No. 5,919,455; U.S. Pat. No. 5,985,263; U.S. Pat. No. 5,990,237; U.S. Pat. No. 6,113,906; U.S. Pat. No. 6,214,966; U.S. Pat. No. 6,258,351; U.S. Pat. No. 6,340,742; U.S. Pat. No. 6,413,507; U.S. Pat. No. 6,420,339; U.S. Pat. No. 6,437,025; U.S. Pat. No. 6,448,369; U.S. Pat. No. 6,461,802; U.S. Pat. No. 6,828,401; U.S. 6,858,736; U.S. 2001/0021763; U.S. 2001/0044526; U.S. 2001/0046481; U.S. 2002/0052430; U.S. 2002/0072573; U.S. 2002/0156047; U.S. 2003/0114647; U.S. 2003/0143596; U.S. 2003/0158333; U.S. 2003/0220447; U.S. 2004/0013637; US 2004/0235734; U.S. 2005/0114037; U.S. 2005/0171328; U.S. 2005/0209416; EP 01064951; EP 0822199; WO 00176640; WO0500360; WO 0002017; WO 0249673; WO 9428024; and WO 0187925).

[0517] In one example, the polyethylene glycol has a molecular weight ranging from about 3 kD to about 50 kD, and typically from about 5 kD to about 30 kD. Covalent attachment of the PEG to the drug (known as “PEGylation”) can be accomplished by known chemical synthesis techniques. For example, the PEGylation of protein can be accomplished by reacting NHS-activated PEG with the protein under suitable reaction conditions.

[0518] While numerous reactions have been described for PEGylation, those that are most generally applicable confer directionality, utilize mild reaction conditions, and do not necessitate extensive downstream processing to remove toxic catalysts or bi-products. For instance, monomethoxy PEG (mPEG) has only one reactive terminal hydroxyl, and thus its use limits some of the heterogeneity of the resulting PEG-protein product mixture. Activation of the hydroxyl group at the end of the polymer opposite to the terminal methoxy group is generally necessary to accomplish efficient protein PEGylation, with the aim being to make the derivatised PEG more susceptible to nucleophilic attack. The attacking nucleophile is usually the epsilon-amino group of a lysyl residue, but other amines also can react (e.g. the N-terminal alpha-amine or the ring amines of histidine) if local conditions are favorable. A more directed attachment is possible in proteins containing a single lysine or cysteine. The latter residue can be targeted by PEG-maleimide for thiol-specific modification. Alternatively, PEG hydrazide can be reacted with a periodate oxidized hyaluronan-degrading enzyme and reduced in the presence of NaCNBH₃. More specifically, PEGylated CMP sugars can be reacted with a hyaluronan-degrading enzyme in the presence of appropriate glycosyl-transferases. One technique is the “PEGylation” technique where a number of polymeric molecules are coupled to the polypeptide in question. When using this technique the immune system has difficulties in recognizing the epitopes on the polypeptide's surface responsible for the formation of antibodies, thereby reducing the immune response. For polypeptides introduced directly into the circulatory system of the human body to give a particular physiological effect (i.e. pharmaceuticals) the typical potential immune response is an IgG and/or IgM response, while polypeptides which are inhaled through the respiratory system (i.e. industrial polypeptide) potentially can cause an IgE response (i.e. allergic response). One of the theories explaining the reduced immune response is that the polymeric molecule(s) shield(s) epitope(s) on the surface of the polypeptide responsible for the immune response leading to antibody formation. Another theory or at least a partial factor is that the heavier the conjugate is, the more reduced immune response is obtained.

[0519] Typically, to make the PEGylated organophosphorus bioscavengers and hyaluronan-degrading enzymes provided herein, PEG moieties are conjugated, via covalent attachment, to the polypeptides. Techniques for PEGylation include, but are not limited to, specialized linkers and coupling chemistries (see e.g., Harris, Adv. Drug Deliv. Rev. 54:459-476, 2002), attachment of multiple PEG moieties to a single conjugation site (such as via use of branched PEGs; see e.g., Veronese et al., Bioorg. Med. Chem. Lett. 12:177-180, 2002), site-specific PEGylation and/or mono-PEGylation (see e.g., Chapman et al., Nature Biotech. 17:780-783, 1999), and site-directed enzymatic PEGylation (see e.g., Sato, Adv. Drug Deliv. Rev., 54:487-504, 2002). Methods and techniques described in the art can produce proteins having 1, 2, 3, 4, 5, 6, 7, 8, 9, 10 or more than 10 PEG or PEG derivatives attached to a single protein molecule (see e.g., U.S. 2006/0104968).

[0520] As an exemplary illustration of the PEGylation of an illustrative method for making PEGylated hyaluronan-degrading enzymes, such as PEGylated hyaluronidases, PEG aldehydes, succinimides and carbonates have each been applied to conjugate PEG moieties, typically succinimidyl PEGs, to rHuPH20. For example, rHuPH20 has been conjugated with exemplary succinimidyl monoPEG (mPEG) reagents including mPEG-Succinimidyl Propionates (mPEG-SPA), mPEG-Succinimidyl Butanoates (mPEG-SBA), and (for attaching “branched” PEGs) mPEG2-N-Hydroxylsuccinimide. These PEGylated succinimidyl esters contain different length carbon backbones between the PEG group and the activated cross-linker, and either a single or branched PEG group. These differences can be used, for example, to provide for different reaction kinetics and to potentially restrict sites available for PEG attachment to rHuPH20 during the conjugation process.

[0521] Succinimidyl PEGs (as above) comprising either linear or branched PEGs can be conjugated to rHuPH20. PEGs can used to generate rHuPH20s reproducibly containing molecules having, on the average, between about three to six or three to six PEG molecules per hyaluronidase. Such PEGylated rHuPH20 compositions can be readily purified to yield compositions having specific activities of approximately 25,000 or 30,000 Unit/mg protein hyaluronidase activity, and being substantially free of non-PEGylated rHuPH20 (less than 5% non-PEGylated).

[0522] Using various PEG reagents, exemplary versions of organophosphorus bioscavengers and hyaluronan-degrading enzymes, in particular soluble human recombinant hyaluronidases (e.g. rHuPH20), can be prepared, for example, using mPEG-SBA (30 kD), mPEG-SMB (30 kD), and branched versions based on mPEG2—NHS (40 kD) and mPEG2-NHS (60 kD). PEGylated versions of rHuPH20 have been generated using NHS chemistries, as well as carbonates, and aldehydes, using each of the following reagents: mPEG2-NHS-40K branched, mPEG-NHS-10K branched, mPEG-NHS-20K branched, mPEG2-NHS-60K branched; mPEG-SBA-5K, mPEG-SBA-20K, mPEG-SBA-30K; mPEG-SMB-20K, mPEG-SMB-30K; mPEG-butyrldehyde; mPEG-SPA-20K, mPEG-SPA-30K; and PEG-NHS-5K-biotin. PEGylated hyaluronidases have also been prepared using PEG reagents available from Dowpharma, a division of Dow Chemical Corporation; including hyaluronidases PEGylated with Dowpharma's p-nitrophenyl-carbonate PEG (30 kDa) and with propionaldehyde PEG (30 kDa).

[0523] In one example, the PEGylation includes conjugation of mPEG-SBA, for example, mPEG-SBA-30K (having a molecular weight of about 30 kDa) or another succinimidyl esters of PEG butanoic acid derivative, to a soluble hyaluronidase. Succinimidyl esters of PEG butanoic acid derivatives, such as mPEG-SBA-30K readily couple to amino groups of proteins. For example, covalent conjugation of m-PEG-SBA-30K and to the exemplary hyaluronan-degrading enzyme preparation designated rHuPH20 (which is approximately 60 KDa in size) provides stable amide bonds between rHuPH20 and mPEG, as shown in Scheme 1, below.

[chemical structure]

[0524] With respect to PEGylation of a hyaluronan-degrading enzyme, typically, the mPEG-SBA-30K or other PEG is added to the hyaluronan-degrading enzyme, in some instances a hyaluronidase, at a PEG:polypeptide molar ratio of 10:1 in a suitable buffer, e.g. 130 mM NaCl/10 mM HEPES at pH 6.8 or 70 mM phosphate buffer, pH 7, followed by sterilization, e.g. sterile filtration, and continued conjugation, for example, with stirring, overnight at 4° C. in a cold room. In one example, the conjugated PEG-hyaluronan-degrading enzyme is concentrated and buffer-exchanged.

[0525] Other methods of coupling succinimidyl esters of PEG butanoic acid derivatives, such as mPEG-SBA-30K are known in the art (see e.g., U.S. Pat. No. 5,672,662; U.S. Pat. No. 6,737,505; and U.S. 2004/0235734). For example, a polypeptide, such as an organophosphorus bioscavenger or hyaluronan-degrading enzyme (e.g. a hyaluronidase), can be coupled to an NHS activated PEG derivative by reaction in a borate buffer (0.1 M, pH 8.0) for one hour at 4° C. The resulting PEGylated protein can be purified by ultrafiltration. Alternatively, PEGylation of a bovine alkaline phosphatase can be accomplished by mixing the phosphatase with mPEG-SBA in a buffer containing 0.2 M sodium phosphate and 0.5 M NaCl (pH 7.5) at 4° C. for 30 minutes. Unreacted PEG can be removed by ultrafiltration. Another method reacts polypeptide with mPEG-SBA in deionized water to which triethylamine is added to raise the pH to 7.2-9. The resulting mixture is stirred at room temperature for several hours to complete the PEGylation.

[0526] Methods for PEGylation of organophosphorus bioscavengers and hyaluronan-degrading polypeptides, including, for example, animal-derived hyaluronidases and bacterial hyaluronan-degrading enzymes, are known to one of skill in the art. See, for example, European Patent No. EP 0400472, which describes the PEGylation of bovine testes hyaluorindase and chondroitin ABC lyase. Also, U.S. Publication No. 2006014968 describes PEGylation of a human hyaluronidase derived from human PH20. For example, the PEGylated hyaluronan-degrading enzyme generally contains at least 3 PEG moieties per molecule. For example, the hyaluronan-degrading enzyme can have a PEG to protein molar ratio between 5:1 and 9:1, for example, 7:1. U.S. Publication No. 20090208480 also describes the PEGylation of butyrylcholinesterase.

### G. METHODS OF ASSESSING ACTIVITY

[0527] Provided herein are methods of assessing the activity of an organophosphorus bioscavenger in compositions or combinations with a hyaluronan-degrading enzyme to assess one or more activities of either or both components. For example, inactivating activity, hydrolytic activity and/or binding activity of an OP bioscavenger can be assessed in in vitro or in vivo assays. In another example, hyaluronidase activity of a hyaluronan-degrading enzyme can be assessed in an in vitro or in vivo assay. For methods of preventing or treating of organophosphorous poisoning, the OP bioscavenger exhibits inactivating activity, hydrolytic activity and/or binding activity and the hyaluronan-degrading enzyme exhibits hyaluronidase activity.

[0528] 1. Organophosphorous Bioscavenger Activity

[0529] a. Enzymatic Activity

[0530] Various methods for assessing the enzymatic activity of OP bioscavengers, such as a cholinesterase, are described in the art (see, for example, Lockridge and La Du, J Biol Chem (1978) 253:361-366; Lockridge, et al. Biochemistry (1997) 36:786-795; Plattborze and Broomfield, Biotechnol. Appl. Biochem. (2000) 31:226-229; and Blong, et al. Biochem J (1997) 327:747-757). For example, a sample containing a cholinesterase can be tested for the presence of enzymatically active AChE or BChE by using the activity assay of Ellman (Ellman, et al. Biochem Pharmacol (1961) 7:88). In some cases kits or reagents are available from commercial or other publicly available sources. For example, Example 5 describes a Cholinesterase BTC kit for measuring butyrylcholinesterase activity. The sample can be, for example, a solution prepared in vitro containing a recombinant cholinesterase or can be a sample, such as a plasma sample, obtained from a subject. In some examples, the sample, such as a plasma sample, is obtained from a subject treated with recombinant cholinesterase.

[0531] In an exemplary assay, levels of AChE or BChE activity can be estimated by mixing a sample, such a plasma sample, with the cholinesterase substrate, such as butyrylthiocholine (BTCh) or acetylthiocholine (ATCh), and the photometric reagent, 5,5′-Dithiobis (2-nitrobenzoic acid) (DTNB; Ellman's Reagent), which quantifies thiols in the sample. The cholinesterase hydrolyzes the BTCh or ATCh to release thiocholine which reacts with the DNTB, cleaving the disulfide bond to give 2-nitro-5-thiobenzoate (NTB⁻), which ionizes to the NTB²⁻ dianion in water at neutral and alkaline pH. The NTB²⁻ ion has a yellow color and can be quantified by measuring absorption of the sample at 405 nM. Such assays can be performed in multiwell format, such as a microtiter plate. In other exemplary assays, levels of AChE or BChE activity can be estimated by staining non-denaturing 4-30% polyacrylamide gradient gels with 2 mM echothiophate iodide as substrate (as described in Lockridge, et al. Biochemistry (1997) 36:786-795). or 2 mM butrylythiocholine as substrate (see Karnovsky and Roots, J Histochem Cytochem (1964) 12:219).

[0532] An additional exemplary assay for assessing cholinesterase activity is the Walter Reed Army Institute of Research Whole Blood cholinesterase assay (WRAIR W B, see U.S. Pat. No. 6,746,850). WRAIR can measure cholinesterase activity in whole blood samples (e.g. blood from a finger prick) and involves calculating the concentration of active AChE and BChE by measuring the hydrolysis of three substrates with known hydrolysis rates by AChE and BChE (e.g. acetylthiocholine iodide (ATC), propionylthiocholine iodide (PTC) and butyrylthiocholine iodide) in the presence of 4,4″-dithidiopyridine (DTP), the indicator for the hydrolyzed thiocholine (UV absorbance at 324). Because AChE and BChE enzymes possess different affinities for the different substrates the precise concentration of each active enzyme in the sample can be calculated. Thus, the concentrations of active plasma BChE and red blood cell AChE can be measure together in this assay.

[0533] Using these methods, the catalytic properties of an OP bioscavenger, such as a recombinant AChE or BChE protein, including Kₘ, Vₘₐₓ, and k_{cat} values, can be determined using butyrylthiocholine or acetylthiocholine as substrates. Similar methodologies can be used with other OP bioscavengers and are known to one of those skilled in the art or can be empirically determined from the description herein. Other methodologies known in the art can also be used to assess ChE function, including electrometry, spectrophotometry, chromatography, ELISA and radiometric methodologies.

[0534] The activity of the enzyme can be calculated in unit measures. For example, for butyrylcholinesterase, one unit of enzyme activity is defined as the amount required to hydrolyze 1 mmol substrate per minute with 720 units equivalent to 1 mg purified human plasma BChE (Duysen et al. (2002) J. Pharmacol Exp Ther 302:751-758).

[0535] In order to normalize or correct the measured level of exogenous OP bioscavenger from the corresponding endogenous cholinesterase present in an animal plasma or sample, a baseline measurement can be made by assessing cholinesterase activity in plasma prior to dosage or administration with an OP bioscavenger. The baseline corrected plasma concentration is the concentration as measured at a time after administration that includes subtraction of the predonse plasma concentration. Hence, this permits normalization of the measured concentrations to remove the endogenous component concentration. Where the baseline endogenous cholinesterase activity is not known, one of skill in the art can generally assign a baseline activity based on height, weight, age, health status and other factors known in the art.

[0536] The OP bioscavenger plasma concentration can be determined by the measured activity of bioscavenger in the plasma as described above. Typically, using an enzymatic assay as described above, the activity is set forth as Units (U) OP Bioscavenger activity per mL of plasma (U/mL). These values can be converted to μg/mL using the specific activity of the particular OP bioscavenger. For example, as described in the examples, PEG-rBChE has a specific activity of about or about between 500 to 800 U/mg. The level circulating OP bioscavenger in the blood can be assessed over time after it is administered by obtaining a sample of plasma and assessing the activity and plasma concentration of the OP bioscavenger in each sample normalized to baseline.

[0537] b. Endogenous Cholinesterase Activity

[0538] The ability of an organophosphorous bioscavenger in combination with a hyaluronan degrading enzyme to prevent or treat the symptoms of organophosphorous poisoning can be assessed by measuring endogenous cholinesterase activity. Acetylcholinesterase (AChE) is an endogenous target of organophosphorous compounds, thereby resulting in cholinergic toxicity. The symptoms of cholinergic toxicity as described in detail elsewhere herein derive from cholinesterase inhibition. Thus, assays to measure endogenous cholinesterase activity also can be employed to assess the activity of the administered OP bioscavenger, such as acetylcholinesterases or butyrlcholinesterase.

[0539] Generally, cholinergic toxicity and organophosphorous poisoning can occur when circulating levels of ChE are less than 20% of normal or when the circulating ChE is completely bound. Hence, endogenous cholinesterase activity can be assessed as a measure of cholinergic toxicity. An organophosphorous bioscavenger prevents or reduces cholinergic toxicity if in the presence of the OP bioscavenger endogenous cholinesterase activity or levels are above 20% or more of the normal or baseline endogenous activity or levels, such as above 25%, 30%, 40%, 50%, 60%, 70%, 80%, 90% of the baseline or normal levels.

[0540] The endogenous activity of ChE can be assessed as described above acetylthiocholine (ATCh) substrate and a photometric reagent. In other examples, human AChE also can be assessed by immunoblotting with antibodies specific to human AChE. For example, an antibody raised against either the common domain unique to human or mouse AChE (N19 and E-19, respectively can be used (available from Santa Cruz Biotechnology, Inc., Santa Cruz, Calif.; see also Evron et al. (2007) The FASEB J., 21:2961).

[0541] It is within the level of one of skill in the art to distinguish endogenous AChE from exogenous OP bioscavenger that is administered. Also, generally, prior to treatment with an OP bioscavenger, the baseline or normal values of AChE are determined. Then, after administration with an OP bioscavenger, the endogenous AChE levels can be monitored over time.

[0542] c. Methods to Assess Therapeutic Efficacy

[0543] Therapeutic effectiveness of a treatment with an organophosphorous bioscavenger, such as AChE or BChE, in combination with a hyaluronan degrading enzyme for the treatment or prevention of organophosphorous poisoning can be assessed in animal models, such as rodents or primates (see for example as in Raveh, et al. Toxicol. Applied Pharm. (1997) 145:43-53; Broomfield, et al. J Pharmacol Exp Ther (1991) 259:633-638; Brandeis, et al. Pharmacol Biochem Behav (1993) 46:889-896; Ashani, et al Biochem Pharmacol (1991) 41:37-41; and Rosenberg, et al. Life Sciences (2002) 72:125-134). Exemplary methods for assessing therapeutic efficacy provided herein can employed to determine therapeutic amounts for administration of an organophosphorous bioscavenger in combination with a hyaluronan degrading enzyme to a human subject for the treatment or prevention of organophosphorous poisoning. Further, the methods can be employed for assessing the efficacy of therapy of a human subject.

[0544] Exemplary methods to assess the therapeutic effectiveness of an organophosphorous bioscavenger in combination with a hyaluronan degrading enzyme include, but are not limited to, assessing cholinesterase activity in the subject, assessing symptoms of organophosphorous poisoning, and assessing the presence of metabolites of hydrolysis of the organophosphorous compound. In these methods, the effect of the hyaluronan degrading enzyme on the therapeutic activity of the organophosphorous bioscavenger can be assessed by performing the method in the presence or absence of the hyaluronan degrading enzyme.

[0545] i. Assessing Cholinesterase Activity

[0546] In exemplary methods, cholinesterase activity as described herein can be measured in a subject in the presence or absence of the organophosphorous bioscavenger in combination with a hyaluronan degrading enzyme and compared to cholinesterase activity following exposure to the organophosphorous agent. In one example, the change in the level of cholinesterase activity in a subject following exposure to an organophosphorous compound can be assessed and compared to the cholinesterase activity in the subject treated with a organophosphorous bioscavenger in combination with a hyaluronan degrading enzyme. For assessing prophylactic activity, the organophosphorous bioscavenger in combination with a hyaluronan degrading enzyme can be administered prior to administration of the organophosphorous agent. For assessing therapeutic activity following exposure, the organophosphorous bioscavenger in combination with a hyaluronan degrading enzyme can be administered following administration of the organophosphorous agent. Following exposure of the subject to the organophosphorous agent, it is expected that the endogenous cholinesterase activity in the subject will decrease. The organophosphorous bioscavenger in combination with a hyaluronan degrading enzyme is determined to be therapeutically effective if it is able to prevent or reduce the decrease in cholinesterase activity in the presence of the organophosphorous agent.

[0547] In these methods, the effect of the hyaluronan degrading enzyme on the therapeutic activity of the organophosphorous bioscavenger can be assessed by performing the method in the presence or absence of the hyaluronan degrading enzyme and comparing the effects on cholinesterase activity in the assay.

[0548] ii. Assessing Symptoms of Organophosphorous Poisoning

[0549] In exemplary methods, one or more symptoms of organophosphorous poisoning can be assessed in a subject following exposure to the organophosphorous agent and compared to prophylactic or post-exposure treatment with the organophosphorous bioscavenger in combination with a hyaluronan degrading enzyme. For example, the ability of treatment with organophosphorous bioscavenger in combination with a hyaluronan degrading enzyme to prevent, reduce or eliminate one or more symptoms of organophosphorous poisoning, such as but not limited to miosis, blurred vision, dark vision, headache, nausea, dizziness, vomiting, hypersecretion (e.g. sweating, salivation, lacrimation, and rhinorrhea), abdominal cramps, diarrhea, urinary incontinence, muscle twitching/fasciculations, paralysis, pallor, muscle weakness, tremors, convulsions, incoordination, diaphoresis, bronchospasm, bronchorrhea, tightness in chest, wheezing, productive cough, pulmonary edema, bradycardia, sinus arrest, tachycardia, hypertension, toxic myocardiopathy, mydriasis, ataxia, anxiety, restlessness, choreiform movement, loss of consciousness, respiratory depression, fatigue, seizures, and psychiatric symptoms (e.g. depression, memory loss, confusion, toxic psychosis), can be assessed.

[0550] In exemplary animal models of organophosphorous poisoning, the ability of treatment with an organophosphorous bioscavenger in combination with a hyaluronan degrading enzyme to prevent reduce or eliminate the adverse effects of cognitive and locomotive impairment can be assessed. There are a variety of tests for cognitive function, including learning and memory testing that can performed in animal models, such as rats or mice (see, for example, United States Patent Application Publication No. 2010/0010097). Learning and/or memory tests include, for example, Inhibitory Avoidance Test, contextual fear conditioning, visual delay non-match to sample, spatial delay non-match to sample, visual discrimination, Barnes circular maze, Morris water maze, radial arm maze tests, Ray Auditory-Visual Learning Test, the Wechsler Logical Memory Test, and the Providence Recognition Memory Test. Additional behavioral test include, but are not limited to postural reflex testing, incline plane test, forepaw grip test and beam walking test (such tests are well known in the art; a description of exemplary tests can also be found in, for example, Abou-Donia et al. Toxicological Sciences 66:148-158 (2002))

[0551] In exemplary tests, animals retention of the learned behavior can be determined, for example, after at least about 1, 2, 4, 6, 8, 12, 14, 16, 18, 20, 22, 24 or more hours after completion of the learning phase to determine whether treatment with a combination provided herein of a hyaluronan degrading enzyme and an organophosphorous bioscavenger can alleviate or inhibit the effects of an organophosphorous compound on memory consolidation prior to or following treatment with the compound. In some examples, prior to testing, the animals can be pretreated with a combination provided herein of a hyaluronan degrading enzyme and an organophosphorous bioscavenger followed by treatment with the organophosphorous compound. Control animals can include, for example, no treatment, treatment with the either the hyaluronan degrading enzyme or the organophosphorous bioscavenger, alone or following treatment with the organophosphorous compound. In some examples, the animals are treated with the organophosphorous compound prior to the administration of the combination of a hyaluronan degrading enzyme and an organophosphorous bioscavenger.

[0552] An exemplary maze testing embodiment is the water maze working memory test. In general, the method utilizes an apparatus which has a circular water tank. The water in the tank is made cloudy by the addition of milk powder. A clear plexiglass platform, supported by a movable stand rest on the bottom of the tank, is submerged just below the water surface. Normally, a swimming rat cannot perceive the location of the platform but it may recall it from a previous experience and training, unless it suffers from some memory impairment. The time taken to locate the platform is measured and referred to as the latency. During the experiment, all orientational cues such as ceiling lights, remain unchanged. Longer latencies are generally observed with rats with some impairment to their memory.

[0553] An exemplary Inhibitory Avoidance Test utilizes an apparatus that has a lit chamber that can be separated from a dark chamber by a sliding door. At training, the animal is placed in the lit chamber for some period of time, and the door is opened. The animal moves to the dark chamber after a short delay—the step-through latency—which is recorded. Upon entry into the dark chamber, the door is shut closed and a foot shock is delivered. Retention of the experience is determined after various time intervals, e.g., 24 or 48 hours, by repeating the test and recording the latency. The protocol is one of many variants of the passive avoidance procedures (for review, see Rush (1988) Behav. Neural. Biol. 50:255).

[0554] iii. Assessing the Metabolites Organophosphorous Compound Hydrolysis

[0555] For organophosphorous bioscavengers that hydrolyze organophosphorous compounds, the products of hydrolysis also can be assessed. For example, following treatment of a subject with an organophosphorous bioscavenger and exposure to the organophosphorous compound, samples obtained from the subject, such as urine or plasma samples, and assayed for an increase in the metabolites. Methods of assaying include but are not limited to gas chromatography (GC) using an electron detector (ECD), a nitrogen/phosphorous detector (NPD), a flame photometric detector (FPD) in phosphorous mode, or a mass spectroscopy detector (MS). In some instances an antibody that is specific to the metabolite can be employed for immunodection.

[0556] d. Exemplary Method for Prophylactic Efficacy

[0557] In an exemplary method, the prophylactic efficacy of an organophosphorous bioscavenger, such as a pegylated recombinant butyrylcholinesterase (PEG-rBChE) alone or in combination with a hyaluronan degrading enzyme, such as recombinant human PH20 (rHuPH20), is evaluated in Hartley guinea pigs exposed to an organophosphorous compound such as a nerve agent, such as Soman or VX. PEG rBChE is administered by intramuscular injection followed by administration of the nerve agent. Animals are observed 6 hrs. post-challenge for cholinergic toxicity and tested at 30 and 48 hrs in a balance beam test and at 1 wk. in the Morris water maze. Therapeutic efficiency can be compared to therapy with other agents for organophosphorous poisoning, such as Atropine, 2-PAM, Diazepam, or to combination therapy with such agents. The pharmacokinetics of an organophosphorous bioscavenger, for example, rBChE (Protexia®, PEG-RBChE), when administered alone or in combination with a hyaluronan-degrading enzyme (e.g. rHuPH20) by intramuscular injection or subcutaneous injection to minipigs are then determined. The results can be compared with intravenous injection of PEG-rBChE alone as a single dose. For pharmacokinetic analysis, serial blood samples are collected from the minipigs by venipuncture of the anterior vena cava following the single dose at the following nominal times: predose (immediately prior to dosing). Plasma samples are analyzed for PEG-rBChE plasma concentration levels using a qualified enzymatic activity assay. Pharmacokinetic sampling are performed to determine maximum “peak” concentration (Cₘₐₓ), Tₘₐₓ (value associated with the observed Cₘₐₓ), elimination rate constant (λ_{z}), terminal elimination phase half-life (T_{1/2}), AUC, bioavailability, Clearance, volume of distribution (Vz), mean residence time (MRT).

[0558] e. Pharmacokinetics and Tolerability

[0559] Pharmacokinetic and tolerability studies can be performed using animal Models or can be performed during clinical studies with patients. Animal models include, but are not limited to, mice, rats, rabbits, dogs, guinea pigs and non-human primate models, such as cynomolgus monkeys or rhesus macaques. In some instances, pharmacokinetic and tolerability studies are performed using healthy animals. In other examples, the studies are performed using animal models of organophosphorous poisoning.

[0560] The pharmacokinetics of an administered organophosphorous bioscavenger, such as an acetylcholinesterase or butyrylcholinesterase, can be assessed by measuring such parameters as the maximum (peak) plasma concentration of the organophosphorous bioscavenger (Cₘₐₓ), the peak time (i.e. when maximum plasma concentration of the organophosphorous bioscavenger occurs; Tₘₐₓ), the minimum plasma concentration (i.e. the minimum plasma concentration of the organophosphorous bioscavenger between doses; Cₘᵢₙ), the elimination half-life (T_{1/2}) and area under the curve (i.e. the area under the curve generated by plotting time versus plasma of the organophosphorous bioscavenger concentration; AUC), following administration. The absolute bioavailability of administered of the organophosphorous bioscavenger is determined by comparing the area under the curve of the organophosphorous bioscavenger following subcutaneous delivery (AUC_{sc}) with the AUC of the organophosphorous bioscavenger following intravenous delivery (AUCᵢᵥ). Absolute bioavailability (F), can be calculated using the formula: F=([AUC]_{sc}×dose_{sc})/([AUC]ᵢᵥ×doseᵢᵥ). The concentration of the organophosphorous bioscavenger in the plasma following administration can be measured using any method known in the art suitable for assessing concentrations of an organophosphorous bioscavenger in samples of blood. Exemplary methods include, but are not limited to, ELISA. Peak blood level of the cholinesterase may be determined following intramuscular injection of AChE or BChE with or without the hyaluronan degrading enzyme (see, e.g., Raveh, et al. Biochem Pharmacol (1993) 45(12):2465).

[0561] A range of doses and different dosing frequency of dosing can be administered in the pharmacokinetic studies to assess the effect of increasing or decreasing concentrations of the organophosphorous bioscavenger and a hyaluronan degrading enzyme in the dose. Pharmacokinetic properties of the administered organophosphorous bioscavenger, such as bioavailability, also can be assessed with or without co-administration of the hyaluronan degrading enzyme. The pharmacokinetic studies can be performed to assess therapeutic concentrations of the organophosphorous bioscavenger attained in circulation when administered with the hyaluronan degrading enzyme and maintenance of therapeutic concentration of the organophosphorous bioscavenger over time.

[0562] Studies to assess safety and tolerability also are known in the art and can be used herein. Following administration of an organophosphorous bioscavenger, with or without co-administration of a hyaluronan degrading enzyme, the development of any adverse reactions can be monitored. Adverse reactions can include, but are not limited to, injection site reactions, such as edema or swelling, headache, fever, fatigue, chills, flushing, dizziness, urticaria, wheezing or chest tightness, nausea, vomiting, rigors, back pain, chest pain, muscle cramps, seizures or convulsions, changes in blood pressure and anaphylactic or severe hypersensitivity responses. Typically, a range of doses and different dosing frequencies are be administered in the safety and tolerability studies to assess the effect of increasing or decreasing concentrations of the organophosphorous bioscavenger and/or hyaluronan degrading enzyme in the dose.

[0563] 2. Assays to Assess Hyaluronan Activity

[0564] Assays to asses hyaluronan activity can be performed separately or in conjugation with those mentioned above to assess the bioscavenging ability of an organophosphorous bioscavenger in combination with a hyaluronan degrading enzyme. Such assays can include, but are not limited to, measuring amounts of hyaluronan in tissue or soluble hyaluronan in plasma, measurements of hyaluronan catabolites in blood or urine, measurements of hyaluronidase activity in plasma, or measurements of interstitial fluid pressure, vascular volume or water content in tumors. Other assays such as measurements of pharmacokinetics, methods for which are well known to those of skill in the art, can be used to assess the pharmacokinetic parameters of hyaluronan administration

[0565] The activity of a hyaluronan degrading enzyme can be assessed using methods well known in the art. For example, the USP XXII assay for hyaluronidase determines activity indirectly by measuring the amount of undegraded hyaluronic, acid, or hyaluronan, (HA) substrate remaining after the enzyme is allowed to react with the HA for 30 min at 37° C. (USP XXII-NF XVII (1990) 644-645 United States Pharmacopeia Convention, Inc, Rockville, Md.). A Hyaluronidase Reference Standard (USP) or National Formulary (NF) Standard Hyaluronidase solution can be used in an assay to ascertain the activity, in units, of any hyaluronidase. In one example, activity is measured using a microturbididy assay. This is based on the formation of an insoluble precipitate when hyaluronic acid binds with serum albumin. The activity is measured by incubating hyaluronidase or a sample containing hyaluronidase, for example blood or plasma, with sodium hyaluronate (hyaluronic acid) for a set period of time (e.g. 10 minutes) and then precipitating the undigested sodium hyaluronate with the addition of acidified serum albumin. The turbidity of the resulting sample is measured at 640 nm after an additional development period. The decrease in turbidity resulting from hyaluronidase activity on the sodium hyaluronate substrate is a measure of hyaluronidase enzymatic activity.

[0566] In another example, hyaluronidase activity is measured using a microtiter assay in which residual biotinylated hyaluronic acid is measured following incubation with hyaluronidase or a sample containing hyaluronidase, for example, blood or plasma (see e.g. Frost and Stern (1997) Anal. Biochem. 251:263-269, U.S. Patent Publication No. 20050260186). The free carboxyl groups on the glucuronic acid residues of hyaluronic acid are biotinylated, and the biotinylated hyaluronic acid substrate is covalently coupled to a microtiter plate. Following incubation with hyaluronidase, the residual biotinylated hyaluronic acid substrate is detected using an avidin-peroxidase reaction; and compared to that obtained following reaction with hyaluronidase standards of known activity. Other assays to measure hyaluronidase activity also are known in the art and can be used in the methods herein (see e.g. Delpech et al., (1995) Anal. Biochem. 229:35-41; Takahashi et al., (2003) Anal. Biochem. 322:257-263).

[0567] The ability of an active hyaluronan degrading enzyme to act as a spreading or diffusing agent also can be assessed. For example, trypan blue dye can be injected, such as subcutaneously or intradermally, with or without a hyaluronan degrading enzyme into the lateral skin on each side of nude mice. The dye area is then measured, such as with a microcaliper, to determine the ability of the hyaluronan degrading enzyme to act as a spreading agent (see e.g. U.S. Published Patent No. 20060104968).

[0568] The above assays can be performed using a hyaluronan degrading enzyme in the presence or absence of an organophsphate bioscavenging agent or using the blood or plasma of a patient or animal treated with a hyuronan degrading enzyme with or without an organophsphate bioscavenging agent.

### H. THERAPEUTIC AND PROPHYLACTIC USES

[0569] Provided herein are methods and uses of a hyaluronan degrading enzyme in combination with an organophosphorous bioscavenger for the prevention and treatment of the symptoms and adverse effects induced by exposure to organophosphorous compounds, including organophosphorous pesticides and nerve agents. Such agents are efficiently absorbed by inhalation, ingestion, and skin penetration and are able to cause toxicity through inhibition of the acetylcholinesterase neurotransmitter. The compositions provided herein of a hyaluronan degrading enzyme in combination with an organophosphorous bioscavenger can be administered for the prevention and treatment of adverse effects of organophosphorous poisoning, including, but not limited to, adverse effects on the muscarinic, nicotinic and central nervous systems. For example, the compositions provided herein of a hyaluronan degrading enzyme in combination with an organophosphorous bioscavenger can be employed for the prevention or treatment of symptoms of organophosphorous poisoning, including but not limited to miosis, blurred vision, dark vision, headache, nausea, dizziness, vomiting, hypersecretion (e.g. sweating, salivation, lacrimation, and rhinorrhea), abdominal cramps, diarrhea, urinary incontinence, muscle twitching/fasciculations, paralysis, pallor, muscle weakness, tremors, convulsions, incoordination, diaphoresis, bronchospasm, bronchorrhea, tightness in chest, wheezing, productive cough, pulmonary edema, bradycardia, sinus arrest, tachycardia, hypertension, toxic myocardiopathy, mydriasis, ataxia, anxiety, restlessness, choreiform movement, loss of consciousness, respiratory depression, fatigue, seizures, and psychiatric symptoms (e.g. depression, memory loss, confusion, toxic psychosis). It is within the level of one of skill in the art to assess whether administration of the compositions provided herein prevent or treat such side effects.

[0570] Any OP bioscavenger provided herein above can be used in the compositions or combinations herein in methods or uses for preventing or treating organophosphate poisoning and associated symptoms. For example, the organophosphorous bioscavenger for use in the prophylactic and treatment methods provided herein can be selected from any organophosphorous bioscavenger provided herein or known in the art, including, but not limited to proteins that bind to or hydrolyze organophosphorous compounds, including but not limited to cholinesterases, such as acetylcholinesterase (AChE) and butyrylcholinesterase (BChE), paraoxonases (e.g. PON), organophosphate hydrolases, such as parathion hydrolase, sarinase, phosphotriesterase, and prolidase, aryldialkylphosphatases, diisopropylfluorophosphatases (e.g. DFPase), organophosphorous acid anhydrase. organophosphate acid anhydrolases (e.g. OPAA), and variants thereof, such as allelic or species variants and derivatives thereof.

[0571] The compositions provided herein of a hyaluronan degrading enzyme in combination with an organophosphorous bioscavenger can be administered to for the prevention and treatment of adverse effects caused by organophosphorous nerve agents including, but not limited to, a C-series nerve agent, a V-series nerve agent or other organophosphorous nerve agents. Exemplary nerve agents include, but are not limited to tabun (GA), methyl parathion, sarin (GB), soman (GD), cyclosarin (GF), GV, EA-3148, VE, VG, VM, VR, VX, diisopropylfluorophosphate (DFP), and PB. In particular examples, the compositions provided herein are used to prevent or treat one or more symptoms of exposure to an organophosphorous nerve agent that is sarin, tabun, or VX.

[0572] The compositions and combinations provided herein of a hyaluronan degrading enzyme in combination with an organophosphorous bioscavenger can be administered to for the prevention and treatment adverse effects caused by organophosphorous pesticide agents including, but not limited to, acephate (Orthene), azinphos-methyl (Gusathion, Guthion), bensulide (Betasan, Lecscosan), bornyl (Swat), bromophos (Nexion), bromophos-ethyl (Nexagan), cadusafos (Apache, Ebufos, Rugby), carabophenothion (Trithion), chiorethoxyfos (Fortress), chlorfenvinphos (Apachlor, Birlane), chlormephos (Dotan), chlorphoxim (Bathion-C), chlorpyrifos (Brodan, Dursban, Lorsban), chlorpyrifos-methyl, chlorthiophos (Celathion), coumaphos (Asuntol, Co-Ral), crytoxyphos (Ciodrin, Cypona), crufomate (Rulene), cyanophenphos (Surecide), cyanophos (Cyanox), cythioate (Cyflee, Proban), DEF (De-Green, E-Z Off D), demeton (Systox), demeton-5-methyl (Duratox, Metasystoxl), dialifor (Torak), diazinon, dichlorofenthion (VC-13 Nemacide), dichlorvos (DDVP, Vapona), dicrotophos (Bidrin), diisopropyl fluorophosphate, dimefos (Hanane, Pestox XIV), dimethoate (Cygon, DeFend), dioxathion (Delnav), disulfoton (Disyston), ditalimfos, edifenphos, endothion, EPBP (S-Seven), EPN, ethion (Ethanox), ethoprop (Mocap), ethyl parathion (E605, Parathion, thiophos), etrimfos (Ekamet), famphur (Bash, Bo-Ana, Famfos), fenamiphos (Nemacur), fenitrothion (Accothion, Agrothion, Sumithion), fenophosphon (Agritoxn trichloronate), fensulfothion (Dasanit), fenthion (Baytex, Entex, Tiguvon), fonofos (Dyfonate, N-2790), formothion (Anthio), fosthietan (Nem-A-Tak), fosthiazate, hepteriophos (Hostaquick), hiometon (Ekatin), hosalone (Zolone), IBP (Kitazin), iodofenphos (Nuvanol-N), isazofos (Brace, Miral, Triumph), isofenphos (Amaze, Oftanol), isoxathion (E-48, Karphos), leptophos (Phosvel), malathion (Cythion), mephosfolan (Cytrolane), merphos (Easy off-D, Folex), methamidophos (Monitor), methidathion (Supracide, Ultracide), methyl parathion (E 601, Penncap-M), methyl trithion, mevinphos (Duraphos, Phosdrin), mipafox (Isopestox, Pestox XV), monocrotophos (Azodrin), naled (Dibrom), omethioate, oxydemeton-methyl (Metasystox-R), oxydeprofos (Metasystox-S), parathion, parathion-methyl, phencapton (G 28029), phenthoate (dimephenthoate, Phenthoate), phorate (Rampart, Thimet), phosalone (Azofene, Zolone), phosfolarr (Cylan, Cyolane), phosmet (Imidan, Prolate), phosphamidon (Dimecron), phostebupirim (Aztec), phoxim (Baythion), pirimiphos-ethyl (Primicid), pirimiphos-methyl (Actellic), profenofos (Curacron), propetamphos (Safrotin), propyl thiopyrophosphate (Aspon), prothoate (Fac), pyrazophos (Afugan, Curamil), pyridaphenthion (Ofunack), quinalphos (Bayrusil), ronnel (Fenchlorphos, Korlan), schradan (OMPA), sulfotep (Bladafum, Dithione, Thiotepp), sulprofos (Bolstar, Helothion), temephos (Abate, Abathion), terbufos (Contraven, Counter), tetrachlorvinphos (Gardona, Rabon), tetraethyl pyrophosphate (TEPP), triazophos (Hostathion), tribufos, and trichlorfon (Dipterex, Dylox, Neguvon, Proxol). In particular examples, the compositions provided herein are used to prevent or treat one or more symptoms of exposure to an organophosphorous pesticide that is dichlorvos, diazinon, chlorpyrifos, ethionmethyl parathion, parathion, malathion, or azinphos-methyl

[0573] Subjects for treatment with compositions of a hyaluronan degrading enzyme in combination with an organophosphorous bioscavenger include mammals, including humans, who are exposed to or risk of exposure to an organophosphorous agent. Exemplary subjects for treatment include, for example, persons exposed to nerve agents, military personnel, agricultural workers and other persons who handle or come in contact with organophosphorous compounds. Factors, such as, but not limited to, the risk of exposure of exposure or toxicity or the particular organophosphorous agent can be considered for selecting subjects or prophylactic or post-exposure treatment.

[0574] Some organophosphorous agents, including but not limited to V-series nerve agents, are persistent agents, meaning that these agents do not degrade or wash away easily and can therefore remain on clothes and other surfaces for long periods. Accordingly, the compositions containing an organophosphorous bioscavenger and a hyaluronan degrading enzyme provided herein can be employed to treat clothing or surfaces contaminated with the organophosphorous agent.

[0575] 1. Prophylactic Treatment and Prevention

[0576] Methods for the treatment or prevention of organophosphorous poisoning include prophylactic treatment prior to exposure to the organophosphorous agent. In such methods, the subject is pretreated with a therapeutically effective amount of a composition of an organophosphorous bioscavenger in combination with a hyaluronan degrading enzyme sufficient to reduce or prevent the occurrence of one or more symptoms of organophosphorous poisoning. Such methods include treatment of a subject about at least or 1, 2, 3, 4, 5, 6, 7, 8, 9, 10, 12, 14, 16, 18, 20, 24, 30, 36, 42, 48 or more hours prior to exposure to the organophosphorous agent.

[0577] The amount of an organophosphorous bioscavenger administered in combination with a hyaluronan degrading enzyme to a subject is sufficient to maintain endogenous cholinesterase activity at a level that does not fall below a level to contribute to cholinergic toxicity and concomitant adverse side effects of exposure to the organophosphorous agent (i.e. cholinergic toxicity). Assays to assess endogenous cholinesterase activity are described above. Typically as described above, the threshold level of a bioscavenger for protection is an amount that maintains the endogenous cholinesterase activity above 20% of baseline activity, such as above 30%, 40%, 50%, 60%, 70%, 80%, 90% or more above baseline activity. In some examples, the amount of bioscavenger is such that the level of endogenous cholinesterase activity is sufficient to prevent any signs of cholinergic toxicity. In some examples, the amount or dosage amount of bioscavenger is selected such that the level of endogenous cholinesterase activity is sufficient to reduce signs of cholinergic toxicity by at least 10%, 15%, 20%, 25%, 30%, 35%, 45%, 50%, 55%, 60%, 65%, 75%, 80%, 90%, 95%, 96%, 97%, 98%, 99%, or more.

[0578] Hence, for prophylactic use, the amount of organophosphorous bioscavenger administered in combination with a hyaluronan degrading enzyme to a subject prior to exposure to an organophosphorous agent is sufficient to maintain at least about 20%, 25%, 30%, 35%, 45%, 50%, 55%, 60%, 65%, 75%, 80%, 85%, 90%, 95% or more of the baseline endogenous cholinesterase activity in the subject following exposure to the organophosphorous agent for several hours or days. Generally, the amount of an organophosphorous bioscavenger administered in combination with a hyaluronan degrading enzyme is sufficient to maintain endogenous cholinesterase activity to at least about 20%, at least about 25%, at least about 30%, at least about 35%, or at least about 40% of the baseline cholinesterase activity in the subject. In a particular example, the amount of an organophosphorous bioscavenger administered in combination with a hyaluronan degrading enzyme is sufficient to maintain endogenous cholinesterase activity to at least about 30% of the baseline cholinesterase activity in the subject. Typically, the cholinesterase activity is maintained at the above recited levels over a desired or predetermined time after administration of the bioscavenger and/or exposure to a nerve agent. For example, cholinesterase activity is maintained at least about 30% of baseline cholinesterase activity for at least 24 hours, 2 days, 3, 4, 5, 6, 7, 8, 9, 10, 11, 12, 13, 14, 15, 16, 17, 18, 19, 20 or more days, and generally at least for 10 days.

[0579] For example, the amount of OP bioscavenger, such as a butyrylcholinesterase, is administered in an amount that maintains at least 15 μg/mL, such as at least 20 μg/mL, 21 μg/mL, 22 μg/mL 23 μg/mL, 24 μg/mL, 25 μg/mL, 26 μg/mL, 27 μg/mL, 28 μg/mL, 29 μg/mL, 30 μg/mL, 40 μg/mL, 50 μg/mL, 60 μg/mL, 70 μg/mL, 80 μg/mL, 90 μg/mL, 100 μg/mL of the OP bioscavenger in plasma within 24 hours of administration and that last for at least 10 days at that level or higher. Generally, the amount of organophosphorous bioscavenger administered in combination with a hyaluronan degrading enzyme that is sufficient prevent cholinergic toxicity following exposure to the organophosphorous agent or treat organophosphosphoruous poisoning is less than the amount of the organophosphorous bioscavenger required in the absence of the hyaluronan degrading enzyme. Such dosages and amounts are described elsewhere herein and can be empirically determined based on the particular OP bioscavenger, organosphosphorous compound (e.g. nerve agent), route of administration, the subject to be treated and/or other parameters that can influence the precise dosage.

[0580] Exemplary amounts that are administered for treatment of organophosphate poisoning include, for example, 50 mg to 1000 mg of OP bioscavenger, such as 100 mg to 800 mg, 200 mg to 750 mg, and in particular at least 500 mg or at least 750 mg OP bioscavenger. For example, dosages of an OP bioscavenger that can be administered include, 0.5 mg/kg to 20 mg/kg, such as 1 mg/kg to 10 mg/kg, 2 mg/kg to 8 mg/kg or 4 mg/kg to 6 mg/kg.

[0581] Dosages of co-administered hyaluronan-degrading enzymes also are described above and elsewhere herein and include, for example, adminstinering at least or least about or 1 Unit (U), 10 U, 100 U, 500 U, 1000 U, 5,000 U, 10,000 U, 20,000 U, 30,000 U, 40,000 U, 50,000 U, 60,000 U, 70,000 U, 80,000 U, 90,000 U, 100,000 U, 110,000 U, 120,000 U, 130,000 U, 140,000 U, 150,000 U, 160,000 U, 170,000 U, 180,000 U, 190,000 U, 200,000 U, 300,000 U, 400,000 U, 500,000 U; 600,000 U; 700,000 U; 800,000 U; 900,000 U; 1,000,000 U; 1,500,000 U; 2,000,000 U; 2,500,000 U; 3,000,000 U; 3,500,000 U; 4,000,000 U; 5,000,000 U; 6,000,000 U or more, per single dosage. Generally, a hyaluronan-degrading enzyme is administered to a subject in an amount that is between or about between 0.01 μg/kg to 25 mg/kg, such as 0.0005 mg/kg (0.5 μg/kg) to 25 mg/kg, 0.5 μg/kg to 10 mg/kg (320,000 U/kg), 0.02 mg/kg to 1.5 mg/kg, 0.01 μg/kg to 15 μg/kg, 0.05 μg/kg to 10 μg/kg, 0.75 μg/kg to 7.5 μg/kg or 1.0 μg/kg to 3.0 μg/kg. For example, a hyaluronan-degrading enzyme can be administered at or about 1 Unit/kg to 800,000 Units/kg, 10 to 100,000 Units/kg, 1 Unit/kg to 1000 Units/kg, 1 Units/kg to 500 Units/kg or 10 Units/kg to 50 Units/kg of the mass of the subject to whom it is administered.

[0582] In particular examples, the OP bioscavenger and hyaluronan-degrading enzyme are administered by percutaneous administration, such as by subcutaneous or intramuscular administration. For example, as found herein, intramuscular administration is associated with increased absorption and bioavailability of the OP bioscavenger when administered in combination with a hyaluronan-degrading enzyme.

[0583] In the prophylactic methods herein for preventing organophosphate poisoning provided herein, the OP bioscavenger is administered prior to exposure with the organosphospate compound (e.g. nerve agent). For example, the OP bioscavenger is administered at least 1 hour, 2 hour, 3 hours, 4 hours, 5 hours, 6 hours, 7 hours, 8 hours, 9 hours, 10 hours, 11 hours, 12 hours, 13 hours, 14 hours, 15 hours, 16 hours, 17 hours, 18 hours, 19 hours, 20 hours, 21 hours, 22 hours, 23 hours, 24 hours, 26 hours, 28 hours, 30 hours, 32 hours, 34 hours, 36 hours, 42 hours, or 48 hours prior to exposure with the organophosphate compound (e.g. nerve agent). Hence, generally, the amount of an organophosphorous bioscavenger administered is sufficient to provide protection from organophosphorous poisoning within 4, 6, 8, 10, 12, 14, 16, 18, 20, 24, 26, 28, 30, 32, 34, 36, 42, or 48 hours after administration of the organophosphorous bioscavenger. Generally, for prophylactic use, the amount of an organophosphorous bioscavenger administered in combination with a hyaluronan degrading enzyme is sufficient to provide protection from organophosphorous poisoning within at least about 24 hours after administration of the organophosphorous bioscavenger.

[0584] The hyaluronan-degrading enzyme is co-formulated or co-administered with the OP bioscavenger. When the hyaluronan-degrading enzyme is co-administered with the OP bioscavenger, it is administered prior to, intermittently, simultaneously or subsequently. For example, the hyaluronan-degrading enzyme can be administered at least 1 minute, 10 minutes, 30 minutes, 1 hour, 2 hours, 3 hours, 4 hours, 5 hours, 6 hours, 12 hours or 24 hours prior to administering the OP bioscavenger. In other examples, the hyaluronan-degrading enzyme is administered within 1 minutes, 10 minutes, 30 minutes, 1 hour, 2 hours, 3 hours, 4 hours, 5 hours, 6 hours, 12 hours or 24 hours after administering the OP bioscavenger.

[0585] In the methods herein, administration of an OP bioscavenger can be repeated for a cycle of administration over weeks, months or years. The particular cycle of administration can depend on the potential exposure of a subject to an organophosphorous compound or poisoning agent. The particular cycle also can depend on the length of organophosphorous poisoning of the particular compound. The frequency of administration a composition or combination containing an OP bioscavenger can be at least every or every 2 days, 3 days, 4 days, 5 days, 6 days, 7 days, 8 days, 9 days, 10 days, 11 days, 12 days, 13 days, 14 days, 3 weeks or one month. For example, the OP bioscavenger and hyaluronan-degrading enzyme are administered at least every 10 days.

[0586] 2. Treatment After Exposure

[0587] Methods for the treatment or prevention of organophosphorous poisoning include treatment of a subject that has been exposed to an organophosphorous agent, including a subject that exhibits one or more symptoms of organophosphorous poisoning. In such methods, the subject is treated with a therapeutically effective amount of a composition of a hyaluronan degrading enzyme in combination with a organophosphorous bioscavenger sufficient to reduce or eliminate one or more symptoms of organophosphorous poisoning. Such methods include treatment of a subject about at least or 1, 5, 10, 20, 30 or more minutes, or about or at least 1, 2, 3, 4, 5, 6, 7, 8, 9, 10, 12, 14, 16, 18, 20, 22, 24, 26, 28, 30, 32, 34, 36 or more hours following exposure to the organophosphorous agent.

[0588] For treatment following exposure to the organophosphorous agent, the amount of organophosphorous bioscavenger administered in combination with a hyaluronan degrading enzyme to a subject following exposure to an organophosphorous agent is sufficient to restore endogenous cholinesterase activity in the subject to at least about 20%, 25%, 30%, 35%, 45%, 50%, 55%, 60%, 65%, 75%, 80%, 85%, 90%, 95% or more of the baseline cholinesterase activity in the subject. Generally, the amount of an organophosphorous bioscavenger administered in combination with a hyaluronan degrading enzyme is sufficient to restore endogenous cholinesterase activity to at least about 20%, at least about 25%, at least about 30%, at least about 35%, or at least about 40% of the baseline cholinesterase activity in the subject. In a particular example, the amount of an organophosphorous bioscavenger administered in combination with a hyaluronan degrading enzyme is sufficient to restore endogenous cholinesterase activity to at least about 30% of the baseline cholinesterase activity in the subject.

[0589] In such methods, the amount of organophosphorous bioscavenger administered in combination with a hyaluronan degrading enzyme that is sufficient to reduce or eliminate one or more symptoms of organophosphorous poisoning is less than the amount of the organophosphorous bioscavenger required in the absence of the hyaluronan degrading enzyme. Such dosages and amounts are described elsewhere herein and can be empirically determined based on the particular OP bioscavenger, organosphosphorous compound (e.g. nerve agent), route of administration, the subject to be treated and/or other parameters that can influence the precise dosage.

[0590] Exemplary amounts that are administered to reduce or eliminate one or more symptoms of organophosphorous poisoning include, for example, 50 mg to 1000 mg of OP bioscavenger, such as 100 mg to 800 mg, 200 mg to 750 mg, and in particular at least 500 mg or at least 750 mg OP bioscavenger. For example, dosages of an OP bioscavenger that can be administered include, 0.5 mg/kg to 20 mg/kg, such as 1 mg/kg to 10 mg/kg, 2 mg/kg to 8 mg/kg or 4 mg/kg to 6 mg/kg.

[0591] Dosages of co-administered hyaluronan-degrading enzymes also are described above and elsewhere herein and include, for example, adminstinering at least or least about or 1 Unit (U), 10 U, 100 U, 500 U, 1000 U, 5,000 U, 10,000 U, 20,000 U, 30,000 U, 40,000 U, 50,000 U, 60,000 U, 70,000 U, 80,000 U, 90,000 U, 100,000 U, 110,000 U, 120,000 U, 130,000 U, 140,000 U, 150,000 U, 160,000 U, 170,000 U, 180,000 U, 190,000 U, 200,000 U, 300,000 U, 400,000 U, 500,000 U; 600,000 U; 700,000 U; 800,000 U; 900,000 U; 1,000,000 U; 1,500,000 U; 2,000,000 U; 2,500,000 U; 3,000,000 U; 3,500,000 U; 4,000,000 U; 5,000,000 U; 6,000,000 U or more, per single dosage. Generally, a hyaluronan-degrading enzyme is administered to a subject in an amount that is between or about between 0.01 μg/kg to 25 mg/kg, such as 0.0005 mg/kg (0.5 μg/kg) to 25 mg/kg, 0.5 μg/kg to 10 mg/kg (320,000 U/kg), 0.02 mg/kg to 1.5 mg/kg, 0.01 μg/kg to 15 μg/kg, 0.05 μg/kg to 10 μg/kg, 0.75 μg/kg to 7.5 μg/kg or 1.0 μg/kg to 3.0 μg/kg. For example, a hyaluronan-degrading enzyme can be administered at or about 1 Unit/kg to 800,000 Units/kg, 10 to 100,000 Units/kg, 1 Unit/kg to 1000 Units/kg, 1 Units/kg to 500 Units/kg or 10 Units/kg to 50 Units/kg of the mass of the subject to whom it is administered.

### I. COMBINATION THERAPIES

[0592] The compositions and combinations of a hyaluronan degrading enzyme in combination with an organophosphorous bioscavenger can be administered in a combination treatment for the prevention or treatment of organophosphorous poisoning. For example, compositions of a hyaluronan degrading enzyme in combination with an organophosphorous bioscavenger can be further co-formulated or co-administered together with, prior to, intermittently with, or subsequent to, other therapeutic or pharmacologic agents or treatments, such as procedures, for example, for the prevention or treatment of one or more effects or symptoms of organophosphorous poisoning. Such agents include, but are not limited to, small molecule compounds, biologics, supportive care, including oxygen therapy, and combinations thereof. Such other agents and treatments that are available for the treatment of organophosphorous poisoning, including all those exemplified herein, are known to one of skill in the art or can be empirically determined.

[0593] A preparation of a second agent or agents or treatment or treatments can be administered at once, or can be divided into a number of smaller doses to be administered at intervals of time. Selected agent/treatment preparations can be administered in one or more doses over the course of a treatment time for example over several hours, days, weeks, or months. In some cases, continuous administration is useful. It is understood that the precise dosage and course of administration depends on the indication and patient's tolerability. Generally, dosing regimes for second agents/treatments herein are known to one of skill in the art.

[0594] In one example, a composition of a hyaluronan degrading enzyme in combination with an organophosphorous bioscavenger is administered as part of a combination therapy, by administering the composition and a second agent for the prevention or treatment of organophosphorous poisoning. In one example, the composition of a hyaluronan degrading enzyme in combination with an organophosphorous bioscavenger and second agent or treatment can be co-formulated and administered together. In another example, the composition of a hyaluronan degrading enzyme in combination with an organophosphorous bioscavenger is administered subsequently, intermittently or simultaneously with the second agent or treatment preparation.

[0595] Exemplary treatments for organophosphorous poisoning involve administration, such as by intravenous or intramuscular injection, of drugs that antagonize the effects of elevated acetylcholine levels, restore normal acetylcholinesterase activity, and treat one or more symptoms of organophosphorous poisoning. Exemplary drugs for the treatment of organophosphorous poisoning include, but are not limited to, carbamates, anti-muscarinics, and cholinesterase (ChE)-reactivators, such as monopyridium and bispyridium oximes. Exemplary drugs for the treatment of delirium associated with organophosphorous poisoning include benzodiazipines, such as diazepam. Exemplary carbamates include, for example, pyridostigmine. Exemplary anti-muscarinics include, for example, atropine. Exemplary oximes include, for example, pralidoxime chloride (pyridinium-2-aldoxime, 2-PAM, Protopam) trimedoxime (TMB-4), obidoxime (LuH-6, Toxogonin) and asoxime (HI-6). Additional treatments for treatment of organophosphorous poisoning include, but are not limited to, gastric lavage for immediate treatment of ingested organophosphorous agents, magnesium sulphate, sodium bicarbonate, glycopyrrolate and alpha-adrenergic receptor agonists.

### J. ARTICLES OF MANUFACTURE AND KITS

[0596] Pharmaceutical compositions of organophosphorus bioscavengers and hyaluronan-degrading enzymes, for example butyrylcholinesterases and hyaluronidases, or nucleic acids encoding organophosphorus bioscavengers and hyaluronan-degrading enzymes, or a derivative or variant thereof can be packaged as articles of manufacture containing packaging material, a pharmaceutical composition which is effective for treating the disease or disorder, and a label that indicates that selected organophosphorus bioscavenger or nucleic acid molecule is to be used for treating the disease or disorder. Instructions for use can be provided. For example, instructions can be provided that specify that the organophosphorus bioscavenger is to be reconstituted with the accompanying liquid buffer or solution immediately before administration. Instructions also can be provided to specify the timing of administration, the route of administration, the particular dosage or amount to be administered and other instructions related to the components and their administration. Combinations of an organophosphorus bioscavenger, for example BChE, or derivative or variant thereof and a hyaluronan-degrading enzyme, e.g., rHuPH20, or derivative or variant thereof, also can be packaged in an article of manufacture.

[0597] The articles of manufacture provided herein contain packaging materials. Packaging materials for use in packaging pharmaceutical products are well known to those of skill in the art. See, for example, U.S. Pat. Nos. 5,323,907, 5,052,558 and 5,033,252, each of which is incorporated herein in its entirety. Examples of pharmaceutical packaging materials include, but are not limited to, blister packs, bottles, tubes, inhalers, pumps, bags, vials, containers, syringes, bottles, and any packaging material suitable for a selected formulation and intended mode of administration and treatment. The articles of manufacture can include a needle or other injection device so as to facilitate administration (e.g. sub-epidermal administration) for local injection purposes. A wide array of formulations of the compounds and compositions provided herein are contemplated as are a variety of treatments for organophosphorus poisoning.

[0598] The choice of package depends on the organophosphorus bioscavenger and hyaluronan-degrading enzyme (if included therewith), and whether such compositions will be packaged together or separately. In general, the packaging is non-reactive with the compositions contained therein such that the organophosphorus bioscavenger retains its activity. In one example, the organophosphorus bioscavenger can be packaged in lyophilized form with a buffer or diluent for reconstitution. The buffer or diluent can be stored separately and provide the hyaluronan-degrading enzyme, or can be provided in a form capable of providing the hyaluronan-degrading enzyme when desired. For example, instructions can be provided to add the hyaluronan-degrading enzyme to the buffer or diluent before use.

[0599] In other examples, the organophosphorus bioscavenger is packaged in the same container as the hyaluronan-degrading enzyme, such that the composition can be administered by the user at will. In one example, the organophosphorus bioscavenger and hyaluronan-degrading enzyme can be packaged together in lyophilized form with a buffer or diluent for reconstitution. The buffer or diluent can be stored separately for use when desired.

[0600] In other examples, the organophosphorus bioscavenger is packaged in a container with the hyaluronan-degrading enzyme such that the composition can be administered by the user at will. Generally, examples of such containers include those that have an enclosed, defined space that contains the organophosphorus bioscavenger, and a separate enclosed, defined space containing the hyaluronan-degrading enzyme such that the two spaces are separated by a readily removable membrane which, upon removal, permits the components to mix. Any container or other article of manufacture is contemplated, so long as the organophosphorus bioscavenger is separated from the hyaluronan-degrading enzyme. Exposure of the hyaluronan-degrading enzyme to the organophosphorus bioscavenger is prior to use. For example, the physical separation means are those that are readily removed by the user, to permit mixing. For example, an article of manufacture can contain an organophosphorus bioscavenger in one compartment and an hyaluronan-degrading enzyme in an adjacent compartment. The compartments are separated by a dividing member, such as a membrane, that, upon compression of the article or manufacture ruptures permitting separated components to mix. For suitable embodiments see e.g., containers described in U.S. Pat. Nos. 3,539,794 and 5,171,081.

[0601] Following are some examples of the packaging requirements of various end uses of organophosphorus bioscavengers. These are offered as examples only and in no way are intended as limiting.

[0602] 1. Single Chamber Apparatus

[0603] Among the simplest embodiments herein, are those in which the apparatus contains a single chamber or container and, if needed, ejection means. Single chamber housings or containers include any item in which an organophosphorus bioscavenger is included in the container. The organophosphorus bioscavenger is housed in the vessel in liquid phase or as a powder or other paste or other convenient composition. The vessel or liquid can be stored at any temperature such that the organophosphorus bioscavenger is stable. An organophosphorus bioscavenger can be reconstituted with an appropriate liquid diluent or buffer containing the hyaluronan-degrading enzyme or the hyaluronan-degrading enzyme can be administered separately at the site of administration. Kits containing the item and the hyaluronan-degrading enzyme also are provided.

[0604] 2. Dual Chamber Apparatus

[0605] An example of an apparatus contemplated for use herein is a dual chamber container. In general, this apparatus has two chambers or compartments thereby maintaining the organophosphorus bioscavenger from the hyaluronan-degrading enzyme until use is desired. The apparatus can include a mixing chamber to permit mixing of the components prior to dispensing from the apparatus. Alternatively, mixing can occur by ejection of the hyaluronan-degrading enzyme from one chamber into a second chamber containing the organophosphorus bioscavenger. For example, the organophosphorus bioscavenger can be provided in lyophilized form, and reconstitution can be achieved by ejection of the hyaluronan-degrading enzyme from a first chamber into the second chamber containing the lyophilized enzyme.

[0606] In one embodiment, a dual chamber apparatus employs a mechanical pump mechanism in its operation. In such an example, the dispensing apparatus maintains the components in separate chambers. A pump mechanism is operated to withdraw the contents from each chamber and into a mixing chamber, or from one chamber into the second chamber. Upon mixing, the mixed composition is activated by reaction of the components in the chambers. The pump mechanism can be manually operated, for example, by a plunger. Exemplary of such dual chamber apparatus include dual chamber syringes (see e.g., U.S. Pat. Nos. 6,972,005, 6,692,468, 5,971,953, 4,529,403, 4,202,314, 4,214,584, 4,983,164, 5,788,670, 5,395,326; and Intl. Patent Appl. Nos. WO2007006030, WO2001047584).

[0607] Another embodiment of a dual chamber fluid dispensing apparatus contemplated for use herein takes the form of a compressible bottle or tube or other similar device. The device has two compartments within it that keep the components separated. The cap of the device can serve as a mixing chamber, a mixing chamber can be positioned between the two chambers and the cap, or mixing can be achieved within one of the chambers. The components are forced by compression from the separate compartments into the mixing chamber. They are then dispensed from the mixing chamber. For example, the mixed contents can be removed from the device by attaching a plunger/syringe apparatus to the dispensing end and withdrawing the contents therethrough. Such devices are known in the art (see e.g., Intl. Pat. Appl. No. WO1994015848).

[0608] 3. Kits

[0609] Selected organophosphorus bioscavengers, e.g., BChE, and hyaluronan-degrading enzymes, e.g., rHuPH20, and/or articles of manufacture thereof also can be provided as kits. Kits can include a pharmaceutical composition described herein and an item for administration provided as an article of manufacture. For example a selected organophosphorus bioscavenger can be supplied with a device for administration, such as a syringe, an inhaler, a dosage cup, a dropper, or an applicator. The compositions can be contained in the item for administration or can be provided separately to be added later. Generally, kits contain an item with a organophosphorus bioscavenger and/or a hyaluronan-degrading enzyme. The kit can, optionally, include instructions for application including dosages, dosing regimens, instructions for using the hyaluronan-degrading enzyme, and instructions for modes of administration. Kits also can include a pharmaceutical composition described herein and an item for diagnosis. For example, such kits can include an item for measuring the concentration, amount or activity of the selected OP bioscavenger in a subject.

### K. EXAMPLES

### Example 1

### Generation of a Soluble rHuPH20-Expressing Cell Line

[0610] The HZ24 plasmid (set forth in SEQ ID NO:52) was used to transfect Chinese Hamster Ovary (CHO cells) (see e.g. U.S. Pat. Nos. 7,76,429 and 7,781,607 and U.S. Publication No. 2006-0104968). The HZ24 plasmid vector for expression of soluble rHuPH20 contains a pCI vector backbone (Promega), DNA encoding amino acids 1-482 of human PH20 hyaluronidase (SEQ ID NO:49), an internal ribosomal entry site (IRES) from the ECMV virus (Clontech), and the mouse dihydrofolate reductase (DHFR) gene. The pCI vector backbone also includes DNA encoding the Beta-lactamase resistance gene (AmpR), an f1 origin of replication, a Cytomegalovirus immediate-early enhancer/promoter region (CMV), a chimeric intron, and an SV40 late polyadenylation signal (SV40). The DNA encoding the soluble rHuPH20 construct contains an NheI site and a Kozak consensus sequence prior to the DNA encoding the methionine at amino acid position 1 of the native 35 amino acid signal sequence of human PH20, and a stop codon following the DNA encoding the tyrosine corresponding to amino acid position 482 of the human PH20 hyaluronidase set forth in SEQ ID NO: 1, followed by a BamHI restriction site. The construct pCI-PH20-IRES-DHFR-SV40pa (HZ24), therefore, results in a single mRNA species driven by the CMV promoter that encodes amino acids 1-482 of human PH20 (set forth in SEQ ID NO:3) and amino acids 1-186 of mouse dihydrofolate reductase (set forth in SEQ ID NO:53), separated by the internal ribosomal entry site (IRES).

[0611] Non-transfected DG44 CHO cells growing in GIBCO Modified CD-CHO media for DHFR(−) cells, supplemented with 4 mM Glutamine and 18 ml/L Plurionic F68/L (Gibco), were seeded at 0.5×10⁶ cells/ml in a shaker flask in preparation for transfection. Cells were grown at 37° C. in 5% CO₂ in a humidified incubator, shaking at 120 rpm. Exponentially growing non-transfected DG44 CHO cells were tested for viability prior to transfection.

[0612] Sixty million viable cells of the non-transfected DG44 CHO cell culture were pelleted and resuspended to a density of 2×10⁷ cells in 0.7 mL of 2× transfection buffer (2×HeBS: 40 mM Hepes, pH 7.0, 274 mM NaCl, 10 mM KCl, 1.4 mM Na₂HPO₄, 12 mM dextrose). To each aliquot of resuspended cells, 0.09 mL (250 μg) of the linear HZ24 plasmid (linearized by overnight digestion with Cla I (New England Biolabs) was added, and the cell/DNA solutions were transferred into 0.4 cm gap BTX (Gentronics) electroporation cuvettes at room temperature. A negative control electroporation was performed with no plasmid DNA mixed with the cells. The cell/plasmid mixes were electroporated with a capacitor discharge of 330 V and 960 μF or at 350 V and 960 μF.

[0613] The cells were removed from the cuvettes after electroporation and transferred into 5 mL of Modified CD-CHO media for DHFR(−) cells, supplemented with 4 mM Glutamine and 18 ml/L Plurionic F68/L (Gibco), and allowed to grow in a well of a E-well tissue culture plate without selection for 2 days at 37° C. in 5% CO₂ in a humidified incubator.

[0614] Two days post-electroporation, 0.5 mL of tissue culture media was removed from each well and tested for the presence of hyaluronidase activity, using a standard microturbidity assay.

TABLE 4
Initial Hyaluronidase Activity of HZ24 Transfected
DG44 CHO cells at 40 hours post-transfection

| | Dilution | Activity (Units/ml) |
|---|---|---|
| Transfection 1 330 V | 1 to 10 | 0.25 |
| Transfection 2 350 V | 1 to 10 | 0.52 |
| Negative Control | 1 to 10 | 0.015 |

[0615] Cells from Transfection 2 (350V) were collected from the tissue culture well, counted and diluted to 1×10⁴ to 2×10⁴ viable cells per mL. A 0.1 mL aliquot of the cell suspension was transferred to each well of five, 96 well round bottom tissue culture plates. One hundred microliters of CD-CHO media (GIBCO) containing 4 mM GlutaMAX™-1 supplement (GIBCO™, Invitrogen Corporation) and without hypoxanthine and thymidine supplements were added to the wells containing cells (final volume 0.2 mL).

[0616] Ten clones were identified from the 5 plates grown without methotrexate.

TABLE 5
Hyaluronidase activity of identified clones

| Plate/Well ID | Relative Hyaluronidase |
|---|---|
| 1C3 | 261 |
| 2C2 | 261 |
| 3D3 | 261 |
| 3E5 | 243 |
| 3C6 | 174 |
| 2G8 | 103 |
| 1B9 | 304 |
| 2D9 | 273 |
| 4D10 | 302 |

[0617] Six HZ24 clones were expanded in culture and transferred into shaker flasks as single cell suspensions. Clones 3D3, 3E5, 2G8, 2D9, 1E11, and 4D10 were plated into 96-well round bottom tissue culture plates using a two-dimensional infinite dilution strategy in which cells were diluted 1:2 down the plate, and 1:3 across the plate, starting at 5000 cells in the top left hand well. Diluted clones were grown in a background of 500 non-transfected DG44 CHO cells per well, to provide necessary growth factors for the initial days in culture. Ten plates were made per subclone, with 5 plates containing 50 nM methotrexate and 5 plates without methotrexate.

[0618] Clone 3D3 produced 24 visual subclones (13 from the no methotrexate treatment, and 11 from the 50 nM methotrexate treatment. Significant hyaluronidase activity was measured in the supernatants from 8 of the 24 subclones (>50 Units/mL), and these 8 subclones were expanded into T-25 tissue culture flasks. Clones isolated from the methotrexate treatment protocol were expanded in the presence of 50 nM methotrexate. Clone 3D35M was further expanded in 500 nM methotrexate giving rise to clones producing in excess of 1,000 Units/ml in shaker flasks (clone 3D35M; or Gen1 3D35M). A master cell bank (MCB) of the 3D35M cells was then prepared.

### Example 2

### Production Gen2 Cells Containing Soluble Human PH20 (rHuPH20)

[0619] The Gen1 3D35M cell line described in Example 1 was adapted to higher methotrexate levels to produce generation 2 (Gen2) clones. 3D35M cells were seeded from established methotrexate-containing cultures into CD CHO medium containing 4 mM GlutaMAX-1™ and 1.0 μM methotrexate. The cells were adapted to a higher methotrexate level by growing and passaging them 9 times over a period of 46 days in a 37° C., 7% CO₂ humidified incubator. The amplified population of cells was cloned out by limiting dilution in 96-well tissue culture plates containing medium with 2.0 μM methotrexate. After approximately 4 weeks, clones were identified and clone 3E10B was selected for expansion. 3E10B cells were grown in CD CHO medium containing 4 mM GlutaMAX-1™ and 2.0 μM methotrexate for 20 passages. A master cell bank (MCB) of the 3E10B cell line was created and frozen and used for subsequent studies.

[0620] Amplification of the cell line continued by culturing 3E10B cells in CD CHO medium containing 4 mM GlutaMAX-1™ and 4.0 μM methotrexate. After the 12^{th} passage, cells were frozen in vials as a research cell bank (RCB). One vial of the RCB was thawed and cultured in medium containing 8.0 μM methotrexate. After 5 days, the methotrexate concentration in the medium was increased to 16.0 then 20.0 μM 18 days later. Cells from the 8^{th} passage in medium containing 20.0 μM methotrexate were cloned out by limiting dilution in 96-well tissue culture plates containing CD CHO medium containing 4 mM GlutaMAX-1™ and 20.0 μM methotrexate. Clones were identified 5-6 weeks later and clone 2B2 was selected for expansion in medium containing 20.0 μM methotrexate. After the 11th passage, 2B2 cells were frozen in vials as a research cell bank (RCB).

[0621] The resultant 2B2 cells are dihydrofolate reductase deficient (dhfr-) DG44 CHO cells that express soluble recombinant human PH20 (rHuPH20). The soluble PH20 is present in 2B2 cells at a copy number of approximately 206 copies/cell. Southern blot analysis of Spe I-, Xba I- and BamH I/Hind III-digested genomic 2B2 cell DNA using a rHuPH20-specific probe revealed the following restriction digest profile: one major hybridizing band of ˜7.7 kb and four minor hybridizing bands (˜13.9, ˜6.6, ˜5.7 and ˜4.6 kb) with DNA digested with Spe I; one major hybridizing band of ˜5.0 kb and two minor hybridizing bands (˜13.9 and ˜6.5 kb) with DNA digested with Xba I; and one single hybridizing band of ˜1.4 kb observed using 2B2 DNA digested with BamH I/Hind III. Sequence analysis of the mRNA transcript indicated that the derived cDNA (SEQ ID NO:49) was identical to the reference sequence (SEQ ID NO:56) except for one base pair difference at position 1131, which was observed to be a thymidine (T) instead of the expected cytosine (C). This is a silent mutation, with no effect on the amino acid sequence.

### Example 3

### A. Production of Gen2 Soluble rHuPH20 in 300 L Bioreactor Cell Culture

[0622] A vial of HZ24-2B2 was thawed and expanded from shaker flasks through 36 L spinner flasks in CD-CHO media (Invitrogen, Carlsbad, Calif.) supplemented with 20 μM methotrexate and GlutaMAX-1™ (Invitrogen). Briefly, the vial of cells was thawed in a 37° C. water bath, media was added and the cells were centrifuged. The cells were re-suspended in a 125 mL shake flask with 20 mL of fresh media and placed in a 37° C., 7% CO₂ incubaor. The cells were expanded up to 40 mL in the 125 mL shake flask. When the cell density reached greater than 1.5×10⁶ cells/mL, the culture was expanded into a 125 mL spinner flask in a 100 mL culture volume. The flask was incubated at 37° C., 7% CO₂. When the cell density reached greater than 1.5×10⁶ cells/mL, the culture was expanded into a 250 mL spinner flask in 200 mL culture volume, and the flask was incubated at 37° C., 7% CO₂. When the cell density reached greater than 1.5×10⁶ cells/mL, the culture was expanded into a 1 L spinner flask in 800 mL culture volume and incubated at 37° C., 7% CO₂. When the cell density reached greater than 1.5×10⁶ cells/mL the culture was expanded into a 6 L spinner flask in 5000 mL culture volume and incubated at 37° C., 7% CO₂. When the cell density reached greater than 1.5×10⁶ cells/nth the culture was expanded into a 36 L spinner flask in 32 L culture volume and incubated at 37° C., 7% CO₂.

[0623] A 400 L reactor was sterilized and 230 mL of CD-CHO media was added. Before use, the reactor was checked for contamination. Approximately 30 L cells were transferred from the 36 L spinner flasks to the 400 L bioreactor (Braun) at an inoculation density of 4.0×10⁵ viable cells per ml and a total volume of 260 L. Parameters were temperature setpoint, 37° C.; Impeller Speed 40-55 RPM; Vessel Pressure: 3 psi; Air Sparge 0.5-1.5 L/Min.; Air Overlay: 3 L/min. The reactor was sampled daily for cell counts, pH verification, media analysis, protein production and retention. Also, during the run nutrient feeds were added. At 120 hrs (day 5), 10.4 L of Feed #1 Medium (4×CD-CHO+33 g/L Glucose+160 mL/L Glutamax-1™+83 mL/L Yeastolate+33 mg/L rHulnsulin) was added. At 168 hours (day 7), 10.8 L of Feed #2 (2×CD-CHO+33 g/L Glucose+80 mL/L Glutamax-1™+167 mL/L Yeastolate+0.92 g/L Sodium Butyrate) was added, and culture temperature was changed to 36.5° C. At 216 hours (day 9), 10.8 L of Feed #3 (1×CD-CHO+50 g/L Glucose+50 mL/L Glutamax-1™+250 mL/L Yeastolate+1.80 g/L Sodium Butyrate) was added, and culture temperature was changed to 36° C. At 264 hours (day 11), 10.8 L of Feed #4 (1× CD-CHO+33 g/L Glucose+33 mL/L Glutamax-1™+250 mL/L Yeastolate+0.92 g/L Sodium Butyrate) was added, and culture temperature was changed to 35.5° C. The addition of the feed media was observed to dramatically enhance the production of soluble rHuPH20 in the final stages of production. The reactor was harvested at 14 or 15 days or when the viability of the cells dropped below 40%. The process resulted in a final productivity of 17,000 Units per ml with a maximal cell density of 12 million cells/mL. At harvest, the culture was sampled for mycoplasma, bioburden, endotoxin and viral in vitro and in vivo, Transmission Electron Microscopy (TEM) and enzyme activity.

[0624] The culture was pumped by a peristaltic pump through four Millistak filtration system modules (Millipore) in parallel, each containing a layer of diatomaceous earth graded to 4-8 μm and a layer of diatomaceous earth graded to 1.4-1.1 μm, followed by a cellulose membrane, then through a second single Millistak filtration system (Millipore) containing a layer of diatomaceous earth graded to 0.4-0.11 μm and a layer of diatomaceous earth graded to <0.1 μm, followed by a cellulose membrane, and then through a 0.22 μm final filter into a sterile single use flexible bag with a 350 L capacity. The harvested cell culture fluid was supplemented with 10 mM EDTA and 10 mM Tris to a pH of T5. The culture was concentrated 10× with a tangential flow filtration (TFF) apparatus using four Sartoslice TFF 30 kDa molecular weight cut-off (MWCO) polyether sulfone (PES) filter (Sartorious), followed by a 10× buffer exchange with 10 mM Tris, 20 mM Na₂SO₄, pH 7.5 into a 0.22 μm final filter into a 50 L sterile storage bag.

[0625] The concentrated, diafiltered harvest was inactivated for virus. Prior to viral inactivation, a solution of 10% Triton® X-100, 3% tri (n-butyl) phosphate (TNBP) was prepared. The concentrated, diafiltered harvest was exposed to 1% Triton® X-100, 0.3% TNBP for 1 hour in a 36 L glass reaction vessel immediately prior to purification on the Q column.

### B. Purification of Gen2 Soluble rHuPH20

[0626] A Q Sepharose (Pharmacia) ion exchange column (9 L resin, H=29 cm, D=20 cm) was prepared. Wash samples were collected for a determination of pH, conductivity and endotoxin (LAL) assay. The column was equilibrated with 5 column volumes of 10 mM Tris, 20 mM Na₂SO₄, pH 7.5. Following viral inactivation, the concentrated, diafiltered harvest was loaded onto the Q column at a flow rate of 100 cm/hr. The column was washed with 5 column volumes of 10 mM Tris, 20 mM Na2SO4, pH 7.5 and 10 mM Hepes, 50 mM NaCl, pH7.0. The protein was eluted with 10 mM Hepes, 400 mM NaCl, pH 7.0 into a 0.22 μm final filter into sterile bag. The eluate sample was tested for bioburden, protein concentration and hyaluronidase activity. A₂₈₀ absorbance reading were taken at the beginning and end of the exchange.

[0627] Phenyl-Sepharose (Pharmacia) hydrophobic interaction chromatography was next performed. A Phenyl-Speharose (PS) column (19-21 L resin, H=29 cm, D=30 cm) was prepared. The wash was collected and sampled for pH, conductivity and endotoxin (LAL assay). The column was equilibrated with 5 column volumes of 5 mM potassium phosphate, 0.5 M ammonium sulfate, 0.1 mM CaCl₂, pH 7.0. The protein eluate from the Q sepharose column was supplemented with 2M ammonium sulfate, 1 M potassium phosphate and 1 M CaCl₂ stock solutions to yield final concentrations of 5 mM, 0.5 M and 0.1 mM, respectively. The protein was loaded onto the PS column at a flow rate of 100 cm/hr and the column flow thru collected. The column was washed with 5 mM potassium phosphate, 0.5 M ammonium sulfate and 0.1 mM CaCl2 pH 7.0 at 100 cm/hr and the wash was added to the collected flow thru. Combined with the column wash, the flow through was passed through a 0.22 μm final filter into a sterile bag. The flow through was sampled for bioburden, protein concentration and enzyme activity.

[0628] An aminophenyl boronate column (Prometics) was prepared. The wash was collected and sampled for pH, conductivity and endotoxin (LAL assay). The column was equilibrated with 5 column volumes of 5 mM potassium phosphate, 0.5 M ammonium sulfate. The PS flow through containing purified protein was loaded onto the aminophenyl boronate column at a flow rate of 100 cm/hr. The column was washed with 5 mM potassium phosphate, 0.5 M ammonium sulfate, pH 7.0. The column was washed with 20 mM bicine, 0.5 M ammonium sulfate, pH 9.0. The column was washed with 20 mM bicine, 100 mM sodium chloride, pH 9.0. The protein was eluted with 50 mM Hepes, 100 mM NaCl, pH 6.9 and passed through a sterile filter into a sterile bag. The eluted sample was tested for bioburden, protein concentration and enzyme activity.

[0629] The hydroxyapatite (HAP) column (Biorad) was prepared. The wash was collected and tested for pH, conductivity and endotoxin (LAL assay). The column was equilibrated with 5 mM potassium phosphate, 100 mM NaCl, 0.1 mM CaCl₂, pH 7.0. The aminophenyl boronate purified protein was supplemented to final concentrations of 5 mM potassium phosphate and 0.1 mM CaCl₂ and loaded onto the HAP column at a flow rate of 100 cm/hr. The column was washed with 5 mM potassium phosphate, pH 7, 100 mM NaCl, 0.1 mM CaCl₂. The column was next washed with 10 mM potassium phosphate, pH 7, 100 mM NaCl, 0.1 mM CaCl₂. The protein was eluted with 70 mM potassium phosphate, pH 7.0 and passed through a 0.22 μm sterile filter into a sterile bag. The eluted sample was tested for bioburden, protein concentration and enzyme activity.

[0630] The HAP purified protein was then passed through a viral removal filter. The sterilized Viosart filter (Sartorius) was first prepared by washing with 2 L of 70 mM potassium phosphate, pH 7.0. Before use, the filtered buffer was sampled for pH and conductivity. The HAP purified protein was pumped via a peristaltic pump through the 20 nM viral removal filter. The filtered protein in 70 mM potassium phosphate, pH 7.0 was passed through a 0.22 μm final filter into a sterile bag. The viral filtered sample was tested for protein concentration, enzyme activity, oligosaccharide, monosaccharide and sialic acid profiling. The sample also was tested for process related impurities.

[0631] The protein in the filtrate was then concentrated to 10 mg/mL using a 10 kD molecular weight cut off (MWCO) Sartocon Slice tangential flow filtration (TFF) system (Sartorius). The filter was first prepared by washing with 10 mM histidine, 130 mM NaCl, pH 6.0 and the permeate was sampled for pH and conductivity. Following concentration, the concentrated protein was sampled and tested for protein concentration and enzyme activity. A 6× buffer exchange was performed on the concentrated protein into the final buffer: 10 mM histidine, 130 mM NaCl, pH 6.0. Following buffer exchange, the concentrated protein was passed though a 0.22 μm filter into a 20 L sterile storage bag. The protein was sampled and tested for protein concentration, enzyme activity, free sulfydryl groups, oligosaccharide profiling and osmolarity.

[0632] The sterile filtered bulk protein was then asceptically dispensed at 20 mL into 30 mL sterile Teflon vials (Nalgene). The vials were then flash frozen and stored at −20±5° C.

### Example 4

### Production of rBChE

[0633] In this example, recombinant butyrylcholinesterase (rBChE) was produced in the mammary gland of transgenic animals, including mice and goats. In short, a DNA expression vector bCN-BchE was developed that contained a 2.4-kb dimerized chicken O-globin gene insulator; a 6.7-kb goat β-casein gene promoter fragment, including the signal sequence in exon 2; a 1.7-kb human butyrylcholinesterase (HuBChE) cDNA clone [ATCC Catalog No. 65726, Manassas, Va.; SEQ ID NO:208)]; and a 6.1-kb fragment containing the β-casein coding and 3′ noncoding regions (see U.S. Pat. Appl. No. 20040016005 and Huang et al., (2007) Proc Natl Acad Sci USA 104:13606-13608). The plasmid backbone of bCN-BChE was removed by NotI digestion and the 16.9-kb rBChE transgene fragment was gel-purified and microinjected into the pronuclei of in vitro-produced zygotes to generate transgenic mice and goats. rBChE was expressed in the transgenic animals and purified.

### A. Plasmid Construction and Preparation of the Transgene DNA Expression Cassette

[0634] All DNA cloning was performed using E. coli Stb12™ competent cells (Invitrogen, Burlington, ON, Canada). Primers for sequencing and PCR were synthesized by Sigma-Genosys (Oakville, ON, Canada). PCR was performed using Ready-To-Go PCR beads (GE Healthcare Life Sciences, Baie d'Urfe, QC, Canada) or a High Fidelity PCR kit (Roche Diagnostics, Laval, QC, Canada).

[0635] The goat b-casein promoter (SEQ ID NO:195), including the 5′ untranscribed region up to exon 2 of the b-casein gene, was amplified by PCR using genomic DNA isolated from blood of a Nigerian dwarf goat (Karatzas and Turner (1997) J Dairy Sci 80:2225-2232) with a sense primer containing the 5′ end of the promoter (Acb582; SEQ ID NO:196) and an anti-sense primer containing an XhoI site downstream of exon 2 just before the ATG codon (Acb591; SEQ ID NO:197). The resulting 6.0-kb PCR product was subcloned into the pUC18 vector (Promega, Madison, Wis.; SEQ ID NO:198) to generate pUC18/5′ bCN. The β-casein gene (SEQ ID NO:199) containing exon 7 and the 3′ end was PCR amplified from the goat genomic DNA with primers Acb583 (SEQ ID NO:200) and Acb601 (SEQ ID NO:201). The fragment was subcloned into the pUC18 vector (SEQ ID NO:198) to generate pUC18/3′ bCN.

[0636] The 4.3-kB fragment encompassing exon 7 and the 3′ end of the goat (3-casein gene was then PCR amplified from pUC18/3′ bCN using primer Acb620 (SEQ ID NO:202) which introduced NotI and XhoI sites and Acb621 (SEQ ID NO:203) which introduced SalI and NotI sites. This fragment was subcloned into the pUC18 vector and designated pUC18bCNA. A 4.9-kB fragment containing the 5′ end of the β-casein promoter including sequences through exon 2 was PCR amplified from pUC18/5′ bCN using primer Acb618 (SEQ ID NO:204) which introduced a BamH1 and SacI site at the 5′ end and primer Acb619 (SEQ ID NO:205) which introduced an XhoI site. The amplified product included an XhoI restriction site and was 6.1 kb. To generate the pUC18/bCN vector, the pUC18bCNA vector was cleaved with XhoI and ligated with the XhoI-digested 6.1-kb PCR product.

[0637] This new vector was then digested with NotI and BamHI and ligated to the insulator fragment derived from an upstream region of the chicken b-globin gene (Chung et al. (1997) Proc Natl Acad Sci USA 94:575-580). The insulator fragment was derived from PCR amplification of genomic DNA from a chicken with two insulator-specific primers Insulator-p1 (SEQ ID NO:206) and Insulator-p2 (SEQ ID NO:207). The PCR product was divided into two portions and cleaved with either NotI and XhoI or BamHI and SalI, then ligated together to form a 2.4-kb insulator fragment with NotI and BamHI on either end. The HuBChE cDNA was amplified by PCR from cDNA clone ATCC #65726 (Arpagaus et al. (1990) Biochemistry 29:124-031) (ATCC, Manassas, Va.; SEQ ID NO:208) with the sense primer Acb719 (SEQ ID NO:209) containing an XhoI site, goat b-casein signal sequence, a partial sequence-corresponding to the mature huBChE, and the antisense primer Acb718 (SEQ ID NO:210) containing an XhoI site and partial 3′ sequence of the human BChE cDNA. The 1.7-kb PCR product was subcloned into the pGEM-T easy vector (Promega; SEQ ID NO:211), the BChE insert fully sequenced, and the plasmid was digested with XhoI to remove the BChE insert which was purified with GFX matrix (GE Healthcare Life Sciences). The purified BChE insert was ligated to XhoI-digested pUC18/bCN plasmid to generate the final bCN-BChE vector.

[0638] Transgenic mice and goats were generated with purified, NotI digested linear DNA of the same vector. Briefly, cesium chloride purified circular bCN-BChE DNA was digested with NotI, separated by electrophoresis and the bCN-BChE fragment isolated from the gel. The gel-purified bCN-BChE DNA was then mixed with cesium chloride and centrifuged at 60,000 rpm for 16 to 20 h at 20° C. in a Beckman L7 ultracentrifuge using a Ti70.1 rotor (Beckman Instruments, Fullerton, Calif.). The DNA band was removed, dialyzed against WFI water for 2 to 4 h and precipitated with ethanol. The precipitated DNA was resuspended in injection buffer (5 mM Tris pH 7.5, 0.1 mM EDTA, 10 mM NaCl) and dialyzed against the same buffer at 4° C. for 8 h, then dialyzed again against the buffer for 16 h and 8 h, respectively. Following dialysis, the DNA was quantified using a fluorometer and stored at 4° C. The DNA was diluted to a concentration of 3 mg/ml in injection buffer before use.

### B. Production of Founder and Subsequent Generation of Transgenic Animals

[0639] Transgenic mice were produced and maintained at McIntyre Transgenic Core Facility of McGill University (Montreal, QC, Canada). Animal studies were carried out in accordance with guidelines on the care and use of experimental animals from the Canadian Council of Animal Care. Transgenic mice were generated in a friend virus B-type (FVB) background strain (Charles River Laboratories, Wilmington, Mass.) (Hogan et al., (1986) Manipulating the Mouse Embryo: A Laboratory Manual (Cold Spring Harbor Lab Press, Cold Spring Harbor, N.Y.)). The bCN-BChE expression vector containing the transgene was microinjected into fertilized eggs, and 22 pups were born. At 2-3 weeks of age, tail biopsies were taken under anesthesia, and DNA was prepared according to standard procedures (see Sambrook et al., (1989) Molecular Cloning: A Laboratory Manual (Cold Spring Harbor Lab Press, Cold Spring Harbor, N.Y.)). Transgenic founder mice were bred with wild-type mice of the same strain for the production of F₁, F₂, and F₃ generations.

[0640] The production and maintenance of transgenic goats were conducted at the PharmAthene Canada Caprine Production Farm. Animal studies were carried out according to protocols approved by the Animal Care Committee of PharmAthene Canada. The production of the founder goats and subsequent generation of rBChE transgenic goats was performed as described in Wang et al., (2002) Mol Reprod Dev 63:437-443. Briefly, 3 μg/ml of the transgene DNA fragment were microinjected into in vitro produced goat zygotes. After a brief in vitro culture, the zygotes were transferred to recipient goats and pregnancies confirmed by transrectal ultrasonography. Newborn kids were separated from recipient goats at birth to prevent disease transmission. Transgenic founder goats were bred with wild-type goats of the same strain for the production of subsequent generations. Cloned copies of a selected female founder goat, 1871F, were generated by somatic cell nuclear transfer (Keefer et al., (2002) Biol Reprod 66:199-203). F₁ goats of the cloned copies of the founder goat were obtained by laparoscopic ovum pick-up-in vitro fertilization (see Baldassarre et al., (2004) Cloning Stem Cells 6:25-29). Herd expansion was performed in nontransgenic New Zealand herd goats by artificial insemination from a master semen bank established from one of the male transgenic F₁ goats, 2219M and some of its male offspring. Transgenic female goats were hormonally induced into lactation (see Cammuso et al., (2000) Anim Biotechnol 11:1-17) at 2 months of age to measure expression of rBChE in the milk before natural lactation took place at 12 months age.

[0641] rBChE transgenic animals were identified and characterized by PCR, Southern blot and FISH analysis, using standard protocols.

C. Purification of rBChE from Milk of Transgenic Goats.

[0642] All of the purification procedures were performed at 20° C. f 2° C., unless otherwise noted. Milk containing rBChE at a concentration of 1-5 g per liter was filtered through a tangential flow filtration system to remove fat and caseins. More than 80% of the rBChE was recovered. The clarified milk (whey) was washed with 7 bed volumes of 10 mM phosphate buffer, pH 7.2, 1 mM EDTA, 140 mM NaCl and concentrated using a 30-kDa flat sheet cartridge. Washed whey was applied to a HQ50 ion exchange column (Applied BioSystems, Foster City, Calif.) previously equilibrated with the same buffer. The eluent (containing the rBChE) was collected and the column was subsequently washed with 10 mM phosphate buffer, pH 7.2, 1 mM EDTA, 1 M NaCl to remove any captured impurities. The HQ50 eluent was loaded onto a procainamide affinity column previously equilibrated with 10 mM phosphate buffer, pH 7.2, 1 mM EDTA, 140 mM NaCl. The column was washed with 10 bed volumes of the same equilibration buffer and the protein was eluted with 10 mM phosphate buffer, pH 7.2, 1 mM EDTA, 500 mM NaCl. The purified rBChE was filtered sterile and stored at 4° C. The purified protein was tested for BChE activity and total protein concentration was determined. The purity of the protein was assessed by SDS/PAGE with silver staining (Invitrogen) as described by the manufacturer.

D. Analysis of rBChE Expressed in the Milk of Transgenic Animals

[0643] Milk samples from transgenic animals, collected after initiation of induced or natural lactation, were analyzed for the presence of the rBChE, using nondenaturing polyacrylamide gels stained for cholinesterase activity (Karnovsky and Roots (1964) J Histochem Cytochem 12:219-221). The rBChE produced in the milk of the transgenic animals migrated as a mixture of dimer, tetramer and monomer, with dimer as the predominant form. Western blot analysis under denaturing and reducing conditions with a polyclonal anti-huBChE antibody confirmed rBChE was expressed in the milk of the transgenic animals migrating at the expected size of the protein (˜90 kDa).

### Example 5

### Butyrylcholinesterase Activity

[0644] In this example, the butyrylcholinesterase activity of rBChE was determined. Milk collected from the transgenic animals during induced or natural lactation was analyzed for BChE activity using a Cholinesterase (BTC) kit (Sigma-Aldrich) at 30° C. with 5 mM butyrylthiocholine as the substrate in a buffer (pH 7.2) or a microtiter plate modification of the previously described Ellman assay (Ellman et al., (1961) Biochem Pharmacol 7, 88-95).

[0645] Using a microplate assay, all wells, including sample wells for a standard curve and control wells, were plated in duplicate. A 40-ml milk sample, diluted in 10 mM potassium phosphate buffer (pH 7.0) containing 1 mM EDTA and 1 mg/ml BSA, was mixed at room temperature with 200 ml of reaction mix containing 1 mM butyrylthiocholine and 0.25 mM 5,5′-Dithiobis (2-nitrobenzoic acid) (DTNB) in 100 mM potassium phosphate buffer (pH 8.0). The sample plate was loaded into a Vₘₐₓ Kinetic Microplate reader (Molecular Devices, Sunnyvale, Calif.) and run for 1 min at 405 nM. The results were analyzed by the Softmax software attached to the Microplate reader. One unit of enzyme activity was defined as the amount required to hydrolyze 1 mmol substrate per minute with 720 units equivalent to 1 mg purified human plasma BChE (Duysen et al. (2002) J Pharmacol Exp Ther 302:751-758).

[0646] Due to the presence of endogenous cholinesterase activity present in naïve animal plasma which was measured in the assay for PEG-rBChE, corrections to the entire plasma concentration-time data were made in order to evaluate only the pharmacokinetic behavior of the exogenously administered agent. For each animal, the baseline (predose) plasma concentration value was subtracted from the rest of concentration-time points for that animal in order to normalize the measured concentrations and remove the endogenous component concentration. This correction was based on the assumption that the endogenous substance measured at baseline would have remained constant over the course of the study.

### Example 6

### PEGylated rBChE

[0647] In this example, rBChE was modified by PEGylation and its pharmacokinetic parameters and prophylactic efficacy against nerve agent exposure were determined.

A. PEGylation of rBChE

[0648] rBChE purified in Example 4 above was PEGylated by reaction of rBChE with PEG 20,000 using lysine linkage chemistry (see published U.S. patent application No. US2011/0135623). Purified rBChE (0.5 mg/ml) was mixed quickly with PEG 20,000 at a ratio of 1:80 in 50 mM sodium phosphate, pH 8.0 and incubated at 24° C. for 2 h. The PEGylated rBChE was purified by affinity chromatography with a procainamide column as described in Example 4 above. SDS/PAGE and SEC-HPLC/light scattering revealed that one to three PEGs were attached to each rBChE molecule.

[0649] Single dose administration in male guinea pigs and subsequent compartmental data analysis of plasma concentration-time data (see Example 7 below) revealed the bioavailability of PEGylated rBChE was ˜46% with a plasma half-life of ˜44 hours as compared to ˜7.3% with a plasma half-life of ˜6.5 hours for unmodified rBChE.

### B. Safety and Prophylactic Efficacy

[0650] A study was performed to assess performance deficits in animals given PEG rBChE or vehicle control 18 hours prior to subcutaneous (SC) administration of a saline nerve agent sham. No toxicity or performance deficits were observed in any of the animals.

[0651] The prophylactic efficacy of PEG-rBChE was evaluated in Hartley guinea pigs exposed to Soman or VX. The experimental design and dosing schedule is set forth in Table 6 below. PEG rBChE was administered at a dosage of 140 mg/kg by intramuscular (IM) injection. Nerve agents VX (LD₅₀=8 μg/kg) or Soman (GD; LD₅₀=28 μg/kg) was administered at a total cumulative dose of 5.5×LD₅₀ 18 hours following administration of PEG rBChE or vehicle control. As a comparison, the effect of other nerve agent therapies also were tested, which were administered upon exposure to nerve agent. Atropine was administered at a dosage of 2 mg/kg by IM injection. Pralidoxime chloride (2PAM, Protopam) was administered at a dosage of 25 mg/kg by IM injection. Diazepam was administered at a dosage of 10 mg/kg by SC injection. Animals were observed 6 hrs. post-challenge for cholinergic toxicity and were tested at 30 and 48 hrs in a balance beam test and at 1 wk. in the Morris water maze. The study was performed at the US Army Medical Research Institute of Chemical Defense (USAMRICD). The results are set forth in Table 6 below. All animals treated with PEG-rBChE prior to nerve agent exposure survived with no signs of cholinergic toxicity. Most animals treated with conventional therapy at the time of nerve agent exposure survived but had significant signs of cholinergic toxicity as well as marked impairment in the balance beam and water maze tests.

TABLE 6
Prophylactic efficacy of PEG-rBChE in
Guinea Pigs exposed to Soman or VX

| | | | Time of | # of |
|---|---|---|---|---|
| SQ Nerve | Nerve | | Nerve Agent | Survivors |
| Agent Dose | Agent | Treatment | Exposure | (Sequelae) |
| Saline Sham | Sham | Vehicle control | +18 hrs | 12/12 |
| | | | | (Normal) |
| 5.5 × LD₅₀ | Soman | PEG-rBChE | +18 hrs | 12/12 |
| | | | | (Normal) |
| 5.5 × LD₅₀ | VX | PEG-rBChE | +18 hrs | 12/12 |
| | | | | (Normal) |
| 1.5 × LD₅₀ | Soman | Atropine/2PAM | +0 hrs | 2/4 |
| | | Diazepam | | (Marked |
| | | | | impairment) |
| 1.5 × LD₅₀ | VX | Atropine/2PAM | +0 hrs | 10/10 |
| | | Diazepam | | (Marked |
| | | | | impairment) |

### Example 7

### Single Dose Pharmacokinetic Evaluation of PEG-rBChE and rHuPH20 by Intramuscular Injection or Subcutaneous Injection in Minipigs

[0652] In this example, the pharmacokinetics of rBChE (Protexia®, PEG-RBChE) when administered alone or in combination with recombinant human hyaluronidase (rHuPH20; produced as described in Examples 1-3) by intramuscular injection or subcutaneous injection to minipigs were determined. The results were compared with intravenous injection of PEG-rBChE alone as a single dose.

### A. Experimental Methods

[0653] Male Gottingen minipigs, ˜23 wks of age, were randomized by weight (˜11-16 kg) into five study groups with 4 male minipigs in each group. Animals were anesthetized prior to dose administration. The experimental design and dosing schedule is set forth in Table 7 below. For the route of administration, intravenous (IV) injection was into the marginal ear vein, intramuscular (IM) injection was in the thigh and subcutaneous (SC) injection was into the inguinal fold. A single dose of 25 mg/kg of PEG-rBChE was administered at Day 1. rHuPH20 was co-administered with PEG-rBChE, in the same composition, to groups 3 and 5 at a dose of 11 μg/Kg. Dose volumes were calculated using the most recent body weight measurement taken prior to Day 1 for each minipig.

TABLE 7
Dosing Schedule

| Group | No. of Animals | Dose Material | Route of |
|---|---|---|---|
| No. | Males | (25 mg/kg PEG-rBChE) | Administration |
| 1 | 4 | PEG-rBChE | Intravenous |
| 2 | 4 | PEG-rBChE | Intramuscular |
| 3 | 4 | PEG-rBChE + rHuPH20 | Intramuscular |
| 4 | 4 | PEG-rBChE | Subcutaneous |
| 5 | 4 | PEG-rBChE + rHuPH20 | Subcutaneous |

### B. Pharmacokinetic Analysis

[0654] For pharmacokinetic analysis, serial blood samples were collected from all minipigs by venipuncture of the anterior vena cava following the single dose at the following nominal times: predose (immediately prior to dosing), 5, 10, 20 and 30 minutes, 1, 2, 4, 8, 12 and 16 hours and on Days 2, 3, 5, 7, 9, 11, 13 and 15 post-dose. Blood was collected into vacutainer tubes containing K₂EDTA as anticoagulant. The blood sample tubes were placed in ice following collection and processed to plasma and frozen. The resultant plasma samples were then analyzed for PEG-rBChE concentrations in all samples from all minipigs. Minipigs were humanely euthanized on Day 15. Animal care and use procedures followed the USDA Animal Welfare Act and the Guide for the Care and Use of Laboratory Animals from the National Research Council.

[0655] Plasma samples were analyzed for PEG-rBChE plasma concentration levels using a qualified enzymatic activity assay as described in Example 5 above. The linear range of the assay was 50 mU/mL to 1200 mU/mL. Reported PEG-rBChE plasma concentration units were mU/mL. These values were converted to μg/mL using the specific activity constant of 644.43 U/mg. Therefore, 1 mU/mL=0.001552 μg/mL.

[0656] Baseline corrected PEG-rBChE plasma concentration-time data was determined as described in Example 6, and were used for further analysis by non-compartmental analysis (NCA) using the software program WinNonlin (WinNonlin Professional version 5.3, PharSight Corp., Mountain View, Calif.). For the non-compartmental analysis, at least 3 measurable concentrations were available in each concentration-time profile. The methods listed below were used, if applicable, in determining the pharmacokinetic parameters.

[0657] a. Determination of Cₘₐₓ

[0658] The maximum “peak” concentration (Cₘₐₓ) was obtained by visual inspection of the baseline corrected concentration-time profiles. In the event of two or more identical “peak” concentrations, the earlier value was reported to be Cₘₐₓ for purposes of accurate evaluation of Tₘₐₓ.

[0659] b. Determination of Tₘₐₓ

[0660] Tₘₐₓ was determined as the time value associated with the observed Cₘₐₓ.

[0661] c. Determination of the Elimination Rate Constant

[0662] Where feasible, the apparent elimination rate constant (λ_{z}) was determined using unweighted linear regression analysis on at least three log-transformed concentrations visually assessed to be on the linear portion of the terminal slope but not including the peak concentration. In general, objective selection of points included in the estimation of half-life required selection of those points which maximized the R² (0.9 or above) for the linear regression.

[0663] The elimination rate constant was not determined if there were less than three concentrations selected. The maximum concentration was not included in the estimation of the elimination rate constant. Furthermore, unless the terminal data point appeared to be part of a new elimination phase, or there was reason to believe that the last concentration was in error, the last measurable concentration was always included.

[0664] d. Determination of Terminal Elimination Half-Life

[0665] Where feasible, the terminal elimination phase half-life (T_{1/2}) was calculated as the ratio of logₑ2 to λ_{z} (e.g., T_{1/2}=0.693/λ_{z}).

[0666] e. Determination of AUC

[0667] i. AUC₀₋ₜ

[0668] The area under the baseline corrected concentration-time curve from time zero to the last quantifiable concentration (AUC₀₋ₜ) was estimated by a combination of linear trapezoidal method on concentrations up to Cₘₐₓ and logarithmic trapezoidal methods on concentrations after Cₘₐₓ. At least three quantifiable concentration values had to be available for calculation of an individual value of AUC.

[0669] ii. AUC_{inf}

[0670] Where feasible, the AUC extrapolated to infinity, AUC_{inf}, was calculated as the sum AUC₀₋ₜ and Cₜ/λ_{z}, where Cₜ is the predicted concentration at time t obtained from the regression analysis used to determine the elimination rate constant. At least three quantifiable concentration values had to be available for calculation of an individual value of AUC, and the elimination rate constant (λ_{z}) had to be estimated as well.

[0671] f. Determination of Bioavailability

[0672] The bioavailability was estimated as the ratio of the mean AUC₀₋ₜ for the IM or SC routes to mean AUC₀₋ₜ the from the IV route. As doses were the same for all routes of administration, no dose correction was required.

[0673] g. Determination of Clearance

[0674] Where feasible, the clearance was estimated using the relationship CL/F=Dose/AUC_{inf}. The dose used for this evaluation was the actual administered dose. Clearance could only be estimated for those minipigs that had associated values for AUC_{inf}.

[0675] h. Determination of Volume of Distribution

[0676] Where feasible, the volume of distribution (Vz) was estimated using the relationship Vz/F=Dose/(λ₂*AUC_{inf}). The dose used was the actual administered dose. Clearance could only be estimated for those minipigs that had associated values for AUC_{inf}.

[0677] i. Determination of Mean Residence Time

[0678] Where feasible, the mean residence time (MRT) from the time of dosing to the time of the last measurable concentration was estimated as AUMC₀₋ₜ/AUC₀₋ₜ.

### C. Results

[0679] Final pharmacokinetic analysis was conducted for minipigs in Groups 1 through 5 who had measurable concentration-time data. One blood sample was received in hemolyzed condition at the bioanalytical lab. No PEG-rBChE plasma concentrations were reported for this sample (animal #S5234558/M, Group 5, Day 1, minute).

[0680] After baseline correction (as described in Example 5), plasma concentrations were available in all minipigs until Day 15, the last day for pharmacokinetic sampling. Actual sampling times calculated from the time of dosing were used in the analysis along with the back calculated total dose based on the rounded off dose volumes in each minipig.

[0681] The terminal slopes in two out of four minipigs in Groups 1, 2, 4 and 5 by Day 8 declined rapidly, indicating nonlinear behavior. Consequently, the elimination rate constant could not be estimated robustly, and therefore only Cₘₐₓ, Tₘₐₓ and AUC₀₋ₜ were calculated and reported for those profiles and all comparisons across groups were made based only on these parameters.

[0682] The 12 hr time point on Day 1 in animal #S5232971/M in Group 3, showed a sudden decrease for no obvious reason. The concentrations returned to the expected levels on the subsequent sample. There was no indication of any problem with the sample or assay. The value was included in the NCA as the impact on AUC was minor.

[0683] A summary of the mean pharmacokinetic parameters is presented in Table 8. The overall pharmacokinetic parameters are presented in Tables 9-13 below for Groups 1 through 5, respectively. Results of each pharmacokinetic parameter are summarized below.

[0684] 1. Baseline Concentration of PEG-rBChE

[0685] The results show that following administration of PEG-rBChE, the baseline corrected concentrations of PEG-rBChE reached peak levels 0.67-1.03 day post-dose, then decreased from peak concentration in a mono-exponential fashion. This concentration-time profile was broadly similar across all dose groups, although there were two animals each in Groups 1, 2, 4 and 5 that by Day 8 declined rapidly, indicating nonlinear pharmacokinetic behavior. The terminal slopes in these two out of four minipigs in Groups 1, 2, 4 and 5 declined rapidly by Day 8. Prior to baseline correction and after baseline correction, the terminal phase remained essentially flat from Day 2 to the end of the evaluation period in the majority of the profiles, indicating all exogenously administered drug had been eliminated.

[0686] 2. Tₘₐₓ

[0687] The median Tₘₐₓ was observed 0.67-1.03 day post-dose day in all minipigs across all dose groups. For intramuscular (IM) administration, the median Tₘₐₓ was 1.03 and 0.67 for PEG-rBChE and PEG-rBChE+rHuPH20, respectively. For subcutanteous (SC) administration, the median Tₘₐₓ values were 1.03 and 0.99, for PEG-rBChE and PEG-rBChE+rHuPH20, respectively.

[0688] 3. Cₘₐₓ

[0689] The mean Cₘₐₓ increased 1.4-fold when PEG-rBChE was administered with rHuPH20 compared to PEG-rBChE administered alone for either route of administration, intramuscularly or subcutaneously. Mean Cₘₐₓ decreased by approximately 18% when administered SC compared to IM administration irrespective of the presence of rHuPH20.

[0690] Overall, the mean Cₘₐₓ was approximately 59% to 76% lower in Groups administered IM or SC either in the presence or absence of rHuPH20 when compared to intravenous administration of PEG-rBChE alone.

[0691] 4. AUC

[0692] The mean AUC₀₋ₜ increased 1.1 and 1.2-fold when PEG-rBChE was administered with rHuPH20 compared to PEG-rBChE administered alone via the IM or SC routes, respectively. Mean AUC₀₋ₜ decreased by approximately 26% and 18% when administered SC compared to IM administration of PEG-rBChE alone and in the presence of rHuPH20, respectively.

[0693] The absolute bioavailability based on mean AUC₀₋ₜ across Groups administered with PEG-rBChE alone, showed a 73% and 53% bioavailability for intramuscular and subcutaneous administrations, respectively, when compared to intravenous bolus administration. The bioavailability increased to 81% and 66% when the respective administrations combined with rHuPH20.

[0694] 5. Half-life

[0695] Overall, the median half-life for PEG-rBChE was approximately 3 to 4 days across all dose groups studied.

[0696] 6. Mean Residence Time (MRT)

[0697] The mean residence time was approximately 3 days across all dose groups.

### D. Summary

[0698] This study demonstrated that the bioavailability of PEG-rBChE in the first 24 hours, by either route of administration (IM or SC), was greatly increased when co-administered with rHuPH20 as compared to PEG-rBChE administered alone. The overall increase in early exposure of PEG-rBChE (alone or with rHuPH20) was greater when administered by the IM route than when administered by the SC route. Absolute bioavailability of PEG-rBChE increased across all groups, and was at least 12% better when administered with rHuPH20 as compared to administration of PEG-rBChE alone. Co-administration with rHuPH20 caused increased absorption of PEG-rBChE by either SC or IM administration in the first 24 hours.

TABLE 8
Mean (SD) Pharmacokinetic Parameters
for PEG-rBChE in Minipigs

| | Dose | | Cₘₐₓ | Tₘₐₓ* | AUC₀₋ₜ |
|---|---|---|---|---|---|
| Group | (25 mg/kg) | N | (μg/mL) | (day) | (μg · day/mL) |
| 1 | IV | 4 | 778 | 0.02 | 1253 |
| | PEG-rBChE | | (127) | (0.00-0.04) | (381) |
| 2 | IM | 4 | 224 | 1.03 | 911 |
| | PEG-rBChE | | (56) | (0.50-1.04) | (90) |
| 3 | IM PEG-rBChE + | 4 | 320 | 0.67 | 1014 |
| | rHuPH20 | | (20) | (0.66-1.00) | (129) |
| 4 | SC | 4 | 184 | 1.03 | 670 |
| | PEG-rBChE | | (51) | (1.03-2.00) | (195) |
| 5 | SC PEG-rBChE + | 4 | 264 | 0.99 | 827 |
| | rHuPH20 | | (18) | (0.50-1.00) | (109) |

IV: Intravenous; IM: Intramuscular; SC: Subcutaneous;
*median (range)

TABLE 9
Individual and Summary Pharmacokinetic Parameters of PEG-rBChE in Minipigs
in Group 1 Following Single Intravenous Injection of PEG-rBChE on Day 1

| | | | Cmax | Tmax | AUC₀₋ₜ | AUC_{inf} | CL | Vz | MRT₀₋ₜ | MRT_{inf} | T½ |
|---|---|---|---|---|---|---|---|---|---|---|---|
| Animal | Dose | Weight | (μg/mL) | (day) | (μg · day/mL) | (μg · day/mL) | (mL/day) | (mL) | (day) | (day) | (day) |
| S5233128/M | 395.85 | 15.81 | 657.294 | 0.04 | 1122.23 | ND | ND | ND | 2.24 | ND | ND |
| S5234205/M | 291.2 | 11.65 | 892.789 | 0.04 | 1821.98 | 2094.02 | 139.06 | 940.4 | 4.02 | 6.20 | 4.69 |
| S5235252/M | 327.6 | 13.09 | 679.022 | 0.01 | 1032.76 | ND | ND | ND | 2.02 | ND | ND |
| S5235342/M | 309.4 | 12.35 | 882.333 | 0.00 | 1037.01 | 1045.44 | 295.95 | 911.58 | 2.38 | 2.50 | 2.14 |
| N | — | — | 4 | 4 | 4 | 2 | 2 | 2 | 4 | 2 | 2 |
| Mean | — | — | 777.860 | 0.023 | 1253.495 | 1569.733 | 217.507 | 925.992 | 2.667 | 4.347 | 3.411 |
| SD | — | — | 127.054 | 0.021 | 381.222 | 741.459 | 110.937 | 20.381 | 0.914 | 2.614 | 1.805 |
| Min | — | — | 657.29 | 0 | 1032.76 | 1045.44 | 139.06 | 911.58 | 2.02 | 2.50 | 2.14 |
| Median | — | — | 780.68 | 0.02 | 1079.62 | 1569.73 | 217.51 | 925.99 | 2.31 | 4.35 | 3.41 |
| Max | — | — | 892.79 | 0.04 | 1821.98 | 2094.02 | 295.95 | 940.4 | 4.02 | 6.20 | 4.69 |
| CV % | — | — | 16.3 | 90.1 | 30.4 | 47.2 | 51.0 | 2.2 | 34.3 | 60.1 | 52.9 |
| Geo Mean | — | — | 770.027 | 0.014 | 1216.472 | 1479.588 | 202.869 | 925.88 | 2.568 | 3.934 | 3.163 |

ND = Not Determined

TABLE 10
Individual and Summary Pharmacokinetic Parameters of PEG-rBChE in Minipigs
in Group 2 Following Single Intramuscular Injection of PEG-rBChE on Day 1

| | | | Cmax | Tmax | AUC₀₋ₜ | AUC_{inf} | CL/F | Vz/F | MRT₀₋ₜ | MRT_{inf} | T½ |
|---|---|---|---|---|---|---|---|---|---|---|---|
| Animal | Dose | Weight | (μg/mL) | (day) | (μg · day/mL) | (μg · day/mL) | (mL/day) | (mL) | (day) | (day) | (day) |
| S5232946/M | 368.55 | 14.74 | 184.303 | 1.04 | 807.36 | ND | ND | ND | 3.24 | ND | ND |
| S5233306/M | 337.61 | 13.50 | 175.500 | 0.50 | 920.18 | ND | ND | ND | 3.42 | ND | ND |
| S5235333/M | 325.78 | 13.02 | 237.334 | 1.03 | 892.51 | 933.05 | 349.16 | 1483.23 | 3.48 | 4.12 | 2.94 |
| S5235368/M | 303.03 | 12.09 | 297.218 | 1.03 | 1024.68 | 1072.17 | 282.63 | 1244.07 | 3.36 | 4.03 | 3.05 |
| N | — | — | 4 | 4 | 4 | 2 | 2 | 2 | 4 | 2 | 2 |
| Mean | — | — | 223.589 | 0.901 | 911.182 | 1002.611 | 315.894 | 1363.652 | 3.377 | 4.076 | 2.998 |
| SD | — | — | 56.173 | 0.267 | 89.610 | 98.375 | 47.04 | 169.112 | 0.104 | 0.069 | 0.075 |
| Min | — | — | 175.50 | 0.50 | 807.36 | 933.05 | 282.63 | 1244.07 | 3.24 | 4.03 | 2.94 |
| Median | — | — | 210.82 | 1.03 | 906.34 | 1002.61 | 315.89 | 1363.65 | 3.39 | 4.08 | 3 |
| Max | — | — | 297.22 | 1.04 | 1024.68 | 1072.17 | 349.16 | 1483.23 | 3.48 | 4.12 | 3.05 |
| CV % | — | — | 25.1 | 29.7 | 9.8 | 9.8 | 14.9 | 12.4 | 3.1 | 1.7 | 2.5 |
| Geo Mean | — | — | 218.555 | 0.863 | 907.894 | 1000.195 | 314.138 | 1358.399 | 3.376 | 4.075 | 2.997 |

ND: Not Determined

TABLE 11
Individual and Summary Pharmacokinetic Parameters of PEG-rBChE in Minipigs in Group
3 Following Single Intramuscular Injection of PEG-rBChE and rHuPH20 on Day 1

| | | | Cmax | Tmax | AUC₀₋ₜ | AUC_{inf} | CL/F | Vz/F | MRT₀₋ₜ | MRT_{inf} | T½ |
|---|---|---|---|---|---|---|---|---|---|---|---|
| Animal | Dose | Weight | (μg/mL) | (day) | (μg · day/mL) | (μg · day/mL) | (mL/day) | (mL) | (day) | (day) | (day) |
| S5232971/M | 316.83 | 12.69 | 341.867 | 0.67 | 859.04 | 885.52 | 357.79 | 1446.95 | 3.18 | 3.63 | 2.80 |
| S5233446/M | 379.48 | 15.20 | 321.687 | 1.00 | 1020.2 | 1037.86 | 365.64 | 1312.24 | 3.16 | 3.41 | 2.49 |
| S5234027/M | 332.94 | 13.32 | 293.423 | 0.66 | 1001.44 | 1058.31 | 314.6 | 1455.98 | 3.41 | 4.22 | 3.21 |
| S5234892/M | 294.46 | 11.79 | 322.000 | 0.66 | 1173.97 | 1252.16 | 235.16 | 1146.88 | 3.68 | 4.62 | 3.38 |
| N | — | — | 4 | 4 | 4 | 4 | 4 | 4 | 4 | 4 | 4 |
| Mean | — | — | 319.744 | 0.748 | 1013.665 | 1058.463 | 318.295 | 1340.514 | 3.357 | 3.969 | 2.97 |
| SD | — | — | 19.926 | 0.167 | 128.84 | 150.392 | 59.796 | 144.86 | 0.239 | 0.553 | 0.402 |
| Min | — | — | 293.42 | 0.66 | 859.04 | 885.52 | 235.16 | 1146.88 | 3.16 | 3.41 | 2.49 |
| Median | — | — | 321.84 | 0.67 | 1010.82 | 1048.09 | 336.19 | 1379.6 | 3.29 | 3.92 | 3.01 |
| Max | — | — | 341.87 | 1.00 | 1173.97 | 1252.16 | 365.64 | 1455.98 | 3.68 | 4.62 | 3.38 |
| CV % | — | — | 6.2 | 22.3 | 12.7 | 14.2 | 18.8 | 10.8 | 7.1 | 13.9 | 13.5 |
| Geo Mean | — | — | 319.272 | 0.736 | 1007.503 | 1050.516 | 313.652 | 1334.399 | 3.351 | 3.94 | 2.949 |

TABLE 12
Individual and Summary Pharmacokinetic Parameters of PEG-rBChE in Minipigs
in Group 4 Following Single Subcutaneous Injection of PEG-rBChE on Day 1

| | | | Cmax | Tmax | AUC₀₋ₜ | AUC_{inf} | CL/F | Vz/F | MRT₀₋ₜ | MRT_{inf} | T½ |
|---|---|---|---|---|---|---|---|---|---|---|---|
| Animal | Dose | Weight | (μg/mL) | (day) | (μg · day/mL) | (μg · day/mL) | (mL/day) | (mL) | (day) | (day) | (day) |
| S5232598/M | 353.99 | 14.14 | 216.731 | 1.03 | 830.30 | 913.82 | 387.37 | 2297.36 | 4.03 | 5.48 | 4.11 |
| S5232602/M | 317.59 | 12.69 | 117.100 | 1.03 | 388.35 | 406.82 | 780.66 | 3608.04 | 3.52 | 4.20 | 3.20 |
| S5232695/M | 340.34 | 13.61 | 229.411 | 1.03 | 755.27 | ND | ND | ND | 2.79 | ND | ND |
| S5233250/M | 285.74 | 11.41 | 171.177 | 2.00 | 704.82 | ND | ND | ND | 3.44 | ND | ND |
| N | — | — | 4 | 4 | 4 | 2 | 2 | 2 | 4 | 2 | 2 |
| Mean | — | — | 183.605 | 1.27 | 669.684 | 660.319 | 584.02 | 2952.701 | 3.446 | 4.843 | 3.657 |
| SD | — | — | 50.902 | 0.486 | 194.515 | 358.501 | 278.098 | 926.79 | 0.511 | 0.903 | 0.641 |
| Min | — | — | 117.1 | 1.03 | 388.35 | 406.82 | 387.37 | 2297.36 | 2.79 | 4.2 | 3.2 |
| Median | — | — | 193.95 | 1.03 | 730.04 | 660.32 | 584.02 | 2952.7 | 3.48 | 4.84 | 3.66 |
| Max | — | — | 229.41 | 2.00 | 830.3 | 913.82 | 780.66 | 3608.04 | 4.03 | 5.48 | 4.11 |
| CV % | — | — | 27.7 | 38.3 | 29.0 | 54.3 | 47.6 | 31.4 | 14.8 | 18.6 | 17.5 |
| Geo Mean | — | — | 177.678 | 1.213 | 643.664 | 609.721 | 549.918 | 2879.057 | 3.416 | 4.801 | 3.629 |

ND: Not Determined

TABLE 13
Individual and Summary Pharmacokinetic Parameters of PEG-rBChE in Minipigs in Group
5 Following Single Subcutaneous Injection of PEG-rBChE and rHuPH20 on Day 1

| | | | Cmax | Tmax | AUC₀₋ₜ | AUC_{inf} | CL/F | Vz/F | MRT₀₋ₜ | MRT_{inf} | T½ |
|---|---|---|---|---|---|---|---|---|---|---|---|
| Animal | Dose | Weight | (μg/mL) | (day) | (μg · day/mL) | (μg · day/mL) | (mL/day) | (mL) | (day) | (day) | (day) |
| S5233489/M | 358 | 14.35 | 239.333 | 0.50 | 671.08 | 677.45 | 528.45 | 1590.81 | 2.81 | 2.94 | 2.09 |
| S5234043/M | 364.27 | 14.57 | 260.757 | 1.00 | 904.73 | 959.08 | 379.81 | 1711.01 | 3.44 | 4.29 | 3.12 |
| S5234558/M | 269.4 | 10.77 | 281.164 | 0.99 | 901.54 | ND | ND | ND | 2.85 | ND | ND |
| S5235295/M | 296.25 | 11.85 | 273.185 | 0.99 | 831.97 | ND | ND | ND | 2.92 | ND | ND |
| N | — | — | 4 | 4 | 4 | 2 | 2 | 2 | 4 | 2 | 2 |
| Mean | — | — | 263.610 | 0.871 | 827.331 | 818.264 | 454.130 | 1650.907 | 3.005 | 3.617 | 2.605 |
| SD | — | — | 18.233 | 0.246 | 109.441 | 199.143 | 105.109 | 84.992 | 0.297 | 0.958 | 0.733 |
| Min | — | — | 239.33 | 0.50 | 671.08 | 677.45 | 379.81 | 1590.81 | 2.81 | 2.94 | 2.09 |
| Median | — | — | 266.97 | 0.99 | 866.76 | 818.26 | 454.13 | 1650.91 | 2.88 | 3.62 | 2.6 |
| Max | — | — | 281.16 | 1.00 | 904.73 | 959.08 | 528.45 | 1711.01 | 3.44 | 4.29 | 3.12 |
| CV % | — | — | 6.9 | 28.3 | 13.2 | 24.3 | 23.1 | 5.1 | 9.9 | 26.5 | 28.1 |
| Geo Mean | — | — | 263.126 | 0.838 | 821.48 | 806.056 | 448.007 | 1649.813 | 2.995 | 3.553 | 2.553 |

ND = Not Determined

[0699] Since modifications will be apparent to those of skill in this art, it is intended that this invention be limited only by the scope of the appended claims.

1. A composition, comprising an organophosphorus (OP) bioscavenger and a hyaluronan-degrading enzyme.

2. The composition of claim 1 that is formulated for single dosage administration.

3. The composition of claim 1, wherein the organophosphorus bioscavenger is an esterase, cholinesterase, paraoxonase, aryldialkylphosphatase or diisopropylfluorophosphatase.

4. The composition of claim 1, wherein the organophosphorus bioscavenger is selected from among acetylcholinesterase (AChE), butyrylcholinesterase (BChE), prolidase, organophosphate acid anhydrolase (OPAA), phosphotriesterase, aryldialkylphosphatase, organophosphorus hydrolase (OPH), parathion hydrolase, diisopropylfluorophosphatase (DFPase), organophosphorus acid anhydrase, sarinase and paraoxonase (PON) and an active portion thereof or a variant thereof that exhibits at least 80% OP binding or inactivating activity.

5. The composition of claim 1, wherein the organophosphorus bioscavenger has the sequence of amino acids set forth in any of SEQ ID NOS: 214-256 and 258-301, an active portion thereof or a variant thereof that exhibits at least 80% sequence identity to any of SEQ ID NOS: 214-256 and 258-301.

6. The composition of claim 1, wherein the organophosphorus bioscavenger is butyrylcholinesterase that has the sequence of amino acids set forth in SEQ ID NO:236, or is an active portion thereof or is a variant thereof that exhibits at least 85% sequence identity to the sequence of amino acids set forth in SEQ ID NO:236.

7. The composition of claim 1, wherein the organophosphorus bioscavenger is modified with a polymer.

8. The composition of claim 7, wherein the polymer is a polyethylene glycol (PEG).

9. The composition of claim 1, wherein the organophosphorus bioscavenger is linked directly or indirectly via a linker to an immunoglobulin, immunoglobulin domain, albumin, transferrin, or transferrin receptor protein.

10. The composition of claim 1, wherein the hyaluronan-degrading enzyme is a hyaluronidase or a chondroitinase, or a variant or a truncated form thereof that exhibits hyaluronan-degrading activity.

11. The composition of claim 1, wherein the hyaluronan-degrading enzyme is a hyaluronidase that is a PH20 or a variant or a truncated form thereof that exhibits hyaluronidase activity.

12. The composition of claim 1, wherein the hyaluronan-degrading enzyme is a truncated human PH20 that consists of a sequence of amino acids set forth in SEQ ID NO:1 that contains a C-terminal truncation after amino acid position 465, 466, 467, 468, 469, 470, 471, 472, 473, 474, 475, 476, 477, 478, 479, 480, 481, 482, 483, 484, 485, 486, 487, 488, 489, 490, 491, 492, 493, 494, 495, 496, 497, 498, 499 or 500 of the sequence of amino acids set forth in SEQ ID NO:1, or is a variant thereof that exhibits at least 85% sequence identity to a sequence of amino acids that contains a C-terminal truncation after amino acid position 465, 466, 467, 468, 469, 470, 471, 472, 473, 474, 475, 476, 477, 478, 479, 480, 481, 482, 483, 484, 485, 486, 487, 488, 489, 490, 491, 492, 493, 494, 495, 496, 497, 498, 499 or 500 of the sequence of amino acids set forth in SEQ ID NO:1 and exhibits hyaluronidase activity.

13. The composition of claim 12, wherein the PH20 has a sequence of amino acids that contains at least amino acids 36-464 of SEQ ID NO:1, or has a sequence of amino acids that has at least 85% sequence identity to a sequence of amino acids that contains at least amino acids 36-464 of SEQ ID NO:1 and exhibits hyaluronidase activity.

14. The composition of claim 1, wherein the hyaluronan-degrading enzyme comprises the sequence of amino acids set forth in any of SEQ ID NOS:4-9 or a sequence of amino acids that exhibits at least 85% sequence identity to any of SEQ ID NOS:4-9.

15. The composition of claim 1, wherein the hyaluronan-degrading enzyme is modified with a polymer.

16. The composition of claim 15, wherein the polymer is a polyethylene glycol (PEG).

17. The composition of claim 1, wherein the organophosphorus bioscavenger is present in the composition at a concentration of between 1 to 1000 μg/mL, 0.5 to 50 mg/mL, 1 to 1000 mg/mL, 50 to 1500 mg/mL, -or 100 to 7500 mg/mL.

18. The composition of claim 1, wherein the hyaluronan-degrading enzyme is present in the composition at a concentration between or between about 10 U/mL to 100,000 U/mL, 1000 U/mL to 50,000 U/ml, 5,000 U/mL to 20,000 U/mL or 10 U/mL to 10,000 U/mL.

19. The composition of claim 1, wherein the hyaluronan-degrading enzyme is present in the composition at a concentration between or about between 10 U/mL to 5000 U/mL.

20. The composition of claim 1, wherein the volume of the composition is between or between about 0.5 mL to 15 mL.

21. A kit, comprising the composition of claim 1, and optionally instructions for use.

22. A combination, comprising:
a first composition containing an organophosphorus bioscavenger; and
a second composition containing a hyaluronan-degrading enzyme.

23. The combination of claim 22, wherein the organophosphorus bioscavenger is an esterase, cholinesterase, paraoxonase, aryldialkylphosphatase or diisopropylfluorophosphatase.

24. The combination of 22, wherein the organophosphorus bioscavenger is selected from among acetylcholinesterase (AChE), butyrylcholinesterase (BChE), prolidase, organophosphate acid anhydrolase (OPAA), phosphotriesterase, aryldialkylphosphatase, organophosphorus hydrolase (OPH), parathion hydrolase, diisopropylfluorophosphatase (DFPase), organophosphorus acid anhydrase, sarinase and paraoxonase (PON) and an active portion thereof or a variant thereof that exhibits at least 80% or more OP binding or inactivating activity.

25. The combination of claim 22, wherein the organophosphorus bioscavenger has the sequence of amino acids set forth in any of SEQ ID NOS: 214-256 and 258-301, an active portion thereof or a variant thereof that exhibits at least 80% or more sequence identity to any of SEQ ID NOS: 214-256 and 258-301.

26. The combination of claim 22, wherein the organophosphorus bioscavenger is butyrylcholinesterase that has the sequence of amino acids set forth in SEQ ID NO:236, or is an active portion thereof or is a variant thereof that exhibits at least 85% sequence identity to the sequence of amino acids set forth in SEQ ID NO:236.

27. The combination of claim 22, wherein the organophosphorus bioscavenger is modified with a polymer.

28. The combination of claim 27, wherein the polymer is a polyethylene glycol (PEG).

29. The combination of claim 22, wherein the organophosphorus bioscavenger is linked directly or indirectly via a linker to an immunoglobulin, immunoglobulin domain, albumin, transferrin, or transferrin receptor protein.

30. The combination of claim 22, wherein the hyaluronan-degrading enzyme is a hyaluronidase or a chondroitinase, or a variant or a truncated form thereof that exhibits hyaluronan-degrading activity.

31. The combination of claim 22, wherein the hyaluronan-degrading enzyme is a hyaluronidase that is a PH20 or a variant or a truncated form thereof that exhibits hyaluronidase activity.

32. The combination of claim 22, wherein the hyaluronan-degrading enzyme is a truncated human PH20 that consists of a sequence of amino acids set forth in SEQ ID NO:1 that contains a C-terminal truncation after amino acid position 465, 466, 467, 468, 469, 470, 471, 472, 473, 474, 475, 476, 477, 478, 479, 480, 481, 482, 483, 484, 485, 486, 487, 488, 489, 490, 491, 492, 493, 494, 495, 496, 497, 498, 499 or 500 of the sequence of amino acids set forth in SEQ ID NO:1, or is a variant thereof that exhibits at least 85% sequence identity to a sequence of amino acids that contains a C-terminal truncation after amino acid position 465, 466, 467, 468, 469, 470, 471, 472, 473, 474, 475, 476, 477, 478, 479, 480, 481, 482, 483, 484, 485, 486, 487, 488, 489, 490, 491, 492, 493, 494, 495, 496, 497, 498, 499 or 500 of the sequence of amino acids set forth in SEQ ID NO:1 and exhibits hyaluronidase activity.

33. The combination of claim 32, wherein the PH20 has a sequence of amino acids that contains at least amino acids 36-464 of SEQ ID NO:1, or has a sequence of amino acids that has at least 85% sequence identity to a sequence of amino acids that contains at least amino acids 36-464 of SEQ ID NO:1 and exhibits hyaluronidase activity.

34. The combination of claim 22, wherein the hyaluronan-degrading enzyme comprises the sequence of amino acids set forth in any of SEQ ID NOS:4-9 or a sequence of amino acids that exhibits at least 85% sequence identity to any of SEQ ID NOS:4-9.

35. The combination of claim 22, wherein the hyaluronan-degrading enzyme is modified with a polymer.

36. The combination of claim 25, wherein the polymer is a polyethylene glycol (PEG).

37. The combination of claim 22, wherein the organophosphorus bioscavenger is present in the first composition at a concentration between 1 to 1000 μg/mL, 0.5 to 50 mg/mL, 1 to 1000 mg/mL, 50 to 1500 mg/mL, or 100 to 750 mg/mL.

38. The combination of claim 22, wherein the hyaluronan-degrading enzyme is present in the second composition at a concentration between or between about 10 U/mL to 100,000 U/mL, 1000 U/mL to 50,000 U/ml, 5,000 U/mL to 20,000 U/mL or 10 U/mL to 10,000 U/mL.

39. The combination of claim 22, wherein the hyaluronan-degrading enzyme is present in the second composition at a concentration between or about between 10 U/mL to 5000 U/mL.

40. The combination of claim 22, wherein the volume of the first or second composition is between or between about 0.5 mL to 15 mL.

41. A kit, comprising the combination of claim 22, and optionally instructions for use.

42. A container, comprising the composition of claim 1.

43. A container, comprising the combination of claim 22, wherein:
the container comprises two compartments;
the first compartment contains the first composition containing a therapeutically effective amount of an organophosphorus bioscavenger; and
the second compartment contains the second composition containing a therapeutically effective amount of hyaluronan-degrading enzyme.

44. The container of claim 43 further comprising a mixing compartment.

45. The container of claim 43 that is a tube, bottle or syringe.

46. The container of claim 45, further comprising a needle for injection.

47. A method for treating or preventing organophosphorus poisoning by administering a composition of claim 1.

48. The method of claim 47, wherein the organophosphorus bioscavenger and hyaluronan-degrading enzyme are administered by subcutaneous administration, intramuscular administration, intralesional administration or intradermal administration.

49. The method of claim 47, wherein the organophosphorus bioscavenger and hyaluronan-degrading enzyme are administered by intramuscular administration.

50. The method of claim 47, wherein the composition is administered between at or about between 6 to 48 hours, 6 to 36 hours, 6 to 24 hours, 12 to 48 hours, 12 to 36 hours, 12 to 24 hours, 24 to 48 hours, 24 to 36 hours, or at least or at least about 6, 7, 8, 9, 10, 11, 12, 13, 14, 15, 16, 17, 18, 24, 30, 36, 42 or 48 hours before exposure to the organophosphorus compound.

51. The method of claim 47, further comprising administering another pharmaceutical agent selected from among carbamates, anti-muscarinics, cholinesterase reactivators and anti-convulsives.

52. A method for treating or preventing organophosphorus poisoning by administering a combination of claim 22.

53. The method of claim 52, wherein the organophosphorus bioscavenger and hyaluronan-degrading enzyme are administered by subcutaneous administration, intramuscular administration, intralesional administration or intradermal administration.

54. The method of claim 52, wherein the organophosphorus bioscavenger and hyaluronan-degrading enzyme are administered by intramuscular administration.

55. The method of claim 52, wherein the combination is administered between at or about between 6 to 48 hours, 6 to 36 hours, 6 to 24 hours, 12 to 48 hours, 12 to 36 hours, 12 to 24 hours, 24 to 48 hours, 24 to 36 hours, or at least or at least about 6, 7, 8, 9, 10, 11, 12, 13, 14, 15, 16, 17, 18, 24, 30, 36, 42 or 48 hours before exposure to the organophosphorus compound.

56. The method of claim 52, further comprising administering another pharmaceutical agent selected from among carbamates, anti-muscarinics, cholinesterase reactivators and anti-convulsives.

The application's sequence listing, which the Patent Office published only in electronic form, follows.

SEQUENCE LISTING (313 sequences)

SEQ ID NO: 1 - protein, 509 aa, Homo sapiens
  precursor human PH20
  SIGNAL (1)...(35): signal sequence
MGVLKFKHIFFRSFVKSSGVSQIVFTFLLIPCCLTLNFRAPPVIPNVPFLWAWNAPSEFCLGKFDEPLDMSLFSFIGSPRINATGQGVTIFYVDRLGYYPYIDSITGVTVNGGIPQKISLQDHLDKAKKDITFYMPVDNLGMAVIDWEEWRPTWARNWKPKDVYKNRSIELVQQQNVQLSLTEATEKAKQEFEKAGKDFLVETIKLGKLLRPNHLWGYYLFPDCYNHHYKKPGYNGSCFNVEIKRNDDLSWLWNESTALYPSIYLNTQQSPVAATLYVRNRVREAIRVSKIPDAKSPLPVFAYTRIVFTDQVLKFLSQDELVYTFGETVALGASGIVIWGTLSIMRSMKSCLLLDNYMETILNPYIINVTLAAKMCSQVLCQEQGVCIRKNWNSSDYLHLNPDNFAIQLEKGGKFTVRGKPTLEDLEQFSEKFYCSCYSTLSCKEKADVKDTDAVDVCIADGVCIDAFLKPPMETEEPQIFYNASPSTLSATMFIVSILFLIISSVASL

SEQ ID NO: 2 - protein, 474 aa, Homo sapiens
  mature human PH20, amino acid residues 36-509
LNFRAPPVIPNVPFLWAWNAPSEFCLGKFDEPLDMSLFSFIGSPRINATGQGVTIFYVDRLGYYPYIDSITGVTVNGGIPQKISLQDHLDKAKKDITFYMPVDNLGMAVIDWEEWRPTWARNWKPKDVYKNRSIELVQQQNVQLSLTEATEKAKQEFEKAGKDFLVETIKLGKLLRPNHLWGYYLFPDCYNHHYKKPGYNGSCFNVEIKRNDDLSWLWNESTALYPSIYLNTQQSPVAATLYVRNRVREAIRVSKIPDAKSPLPVFAYTRIVFTDQVLKFLSQDELVYTFGETVALGASGIVIWGTLSIMRSMKSCLLLDNYMETILNPYIINVTLAAKMCSQVLCQEQGVCIRKNWNSSDYLHLNPDNFAIQLEKGGKFTVRGKPTLEDLEQFSEKFYCSCYSTLSCKEKADVKDTDAVDVCIADGVCIDAFLKPPMETEEPQIFYNASPSTLSATMFIVSILFLIISSVASL

SEQ ID NO: 3 - protein, 482 aa, Homo sapiens
  precursor soluble human PH20, amino acid residues 1-482
  SIGNAL (1)...(35): signal sequence
MGVLKFKHIFFRSFVKSSGVSQIVFTFLLIPCCLTLNFRAPPVIPNVPFLWAWNAPSEFCLGKFDEPLDMSLFSFIGSPRINATGQGVTIFYVDRLGYYPYIDSITGVTVNGGIPQKISLQDHLDKAKKDITFYMPVDNLGMAVIDWEEWRPTWARNWKPKDVYKNRSIELVQQQNVQLSLTEATEKAKQEFEKAGKDFLVETIKLGKLLRPNHLWGYYLFPDCYNHHYKKPGYNGSCFNVEIKRNDDLSWLWNESTALYPSIYLNTQQSPVAATLYVRNRVREAIRVSKIPDAKSPLPVFAYTRIVFTDQVLKFLSQDELVYTFGETVALGASGIVIWGTLSIMRSMKSCLLLDNYMETILNPYIINVTLAAKMCSQVLCQEQGVCIRKNWNSSDYLHLNPDNFAIQLEKGGKFTVRGKPTLEDLEQFSEKFYCSCYSTLSCKEKADVKDTDAVDVCIADGVCIDAFLKPPMETEEPQIFY

SEQ ID NO: 4 - protein, 447 aa, Homo sapiens [sequence omitted]

SEQ ID NO: 5 - protein, 446 aa, Homo sapiens
  mature soluble human PH20, amino acid residues 36-481
LNFRAPPVIPNVPFLWAWNAPSEFCLGKFDEPLDMSLFSFIGSPRINATGQGVTIFYVDRLGYYPYIDSITGVTVNGGIPQKISLQDHLDKAKKDITFYMPVDNLGMAVIDWEEWRPTWARNWKPKDVYKNRSIELVQQQNVQLSLTEATEKAKQEFEKAGKDFLVETIKLGKLLRPNHLWGYYLFPDCYNHHYKKPGYNGSCFNVEIKRNDDLSWLWNESTALYPSIYLNTQQSPVAATLYVRNRVREAIRVSKIPDAKSPLPVFAYTRIVFTDQVLKFLSQDELVYTFGETVALGASGIVIWGTLSIMRSMKSCLLLDNYMETILNPYIINVTLAAKMCSQVLCQEQGVCIRKNWNSSDYLHLNPDNFAIQLEKGGKFTVRGKPTLEDLEQFSEKFYCSCYSTLSCKEKADVKDTDAVDVCIADGVCIDAFLKPPMETEEPQIF

SEQ ID NO: 6 - protein, 445 aa, Homo sapiens
  mature soluble human PH20, amino acid residues 36-480
LNFRAPPVIPNVPFLWAWNAPSEFCLGKFDEPLDMSLFSFIGSPRINATGQGVTIFYVDRLGYYPYIDSITGVTVNGGIPQKISLQDHLDKAKKDITFYMPVDNLGMAVIDWEEWRPTWARNWKPKDVYKNRSIELVQQQNVQLSLTEATEKAKQEFEKAGKDFLVETIKLGKLLRPNHLWGYYLFPDCYNHHYKKPGYNGSCFNVEIKRNDDLSWLWNESTALYPSIYLNTQQSPVAATLYVRNRVREAIRVSKIPDAKSPLPVFAYTRIVFTDQVLKFLSQDELVYTFGETVALGASGIVIWGTLSIMRSMKSCLLLDNYMETILNPYIINVTLAAKMCSQVLCQEQGVCIRKNWNSSDYLHLNPDNFAIQLEKGGKFTVRGKPTLEDLEQFSEKFYCSCYSTLSCKEKADVKDTDAVDVCIADGVCIDAFLKPPMETEEPQI

SEQ ID NO: 7 - protein, 444 aa, Homo sapiens
  mature soluble human PH20, amino acid residues 36-479
LNFRAPPVIPNVPFLWAWNAPSEFCLGKFDEPLDMSLFSFIGSPRINATGQGVTIFYVDRLGYYPYIDSITGVTVNGGIPQKISLQDHLDKAKKDITFYMPVDNLGMAVIDWEEWRPTWARNWKPKDVYKNRSIELVQQQNVQLSLTEATEKAKQEFEKAGKDFLVETIKLGKLLRPNHLWGYYLFPDCYNHHYKKPGYNGSCFNVEIKRNDDLSWLWNESTALYPSIYLNTQQSPVAATLYVRNRVREAIRVSKIPDAKSPLPVFAYTRIVFTDQVLKFLSQDELVYTFGETVALGASGIVIWGTLSIMRSMKSCLLLDNYMETILNPYIINVTLAAKMCSQVLCQEQGVCIRKNWNSSDYLHLNPDNFAIQLEKGGKFTVRGKPTLEDLEQFSEKFYCSCYSTLSCKEKADVKDTDAVDVCIADGVCIDAFLKPPMETEEPQ

SEQ ID NO: 8 - protein, 443 aa, Homo sapiens
  mature soluble human PH20, amino acid residues 36-478
LNFRAPPVIPNVPFLWAWNAPSEFCLGKFDEPLDMSLFSFIGSPRINATGQGVTIFYVDRLGYYPYIDSITGVTVNGGIPQKISLQDHLDKAKKDITFYMPVDNLGMAVIDWEEWRPTWARNWKPKDVYKNRSIELVQQQNVQLSLTEATEKAKQEFEKAGKDFLVETIKLGKLLRPNHLWGYYLFPDCYNHHYKKPGYNGSCFNVEIKRNDDLSWLWNESTALYPSIYLNTQQSPVAATLYVRNRVREAIRVSKIPDAKSPLPVFAYTRIVFTDQVLKFLSQDELVYTFGETVALGASGIVIWGTLSIMRSMKSCLLLDNYMETILNPYIINVTLAAKMCSQVLCQEQGVCIRKNWNSSDYLHLNPDNFAIQLEKGGKFTVRGKPTLEDLEQFSEKFYCSCYSTLSCKEKADVKDTDAVDVCIADGVCIDAFLKPPMETEEP

SEQ ID NO: 9 - protein, 442 aa, Homo sapiens
  mature soluble human PH20, amino acid residues 36-477
LNFRAPPVIPNVPFLWAWNAPSEFCLGKFDEPLDMSLFSFIGSPRINATGQGVTIFYVDRLGYYPYIDSITGVTVNGGIPQKISLQDHLDKAKKDITFYMPVDNLGMAVIDWEEWRPTWARNWKPKDVYKNRSIELVQQQNVQLSLTEATEKAKQEFEKAGKDFLVETIKLGKLLRPNHLWGYYLFPDCYNHHYKKPGYNGSCFNVEIKRNDDLSWLWNESTALYPSIYLNTQQSPVAATLYVRNRVREAIRVSKIPDAKSPLPVFAYTRIVFTDQVLKFLSQDELVYTFGETVALGASGIVIWGTLSIMRSMKSCLLLDNYMETILNPYIINVTLAAKMCSQVLCQEQGVCIRKNWNSSDYLHLNPDNFAIQLEKGGKFTVRGKPTLEDLEQFSEKFYCSCYSTLSCKEKADVKDTDAVDVCIADGVCIDAFLKPPMETEE

SEQ ID NO: 10 - protein, 450 aa, Bos taurus
  cow hyaluronidase-1 precursor
  SIGNAL (1)...(35): signal sequence
MRPFSLEVSLHLPWAMAAHLLPVCTLFLNLLSMTQGSRDPVVPNQPFTTIWNANTEWCMKKHGVDVDISIFDVVTNPGQTFRGPNMTIFYSSQLGTYPYYTSAGEPVFGGLPQNASLNAHLARTFQDILAAMPEPRFSGLAVIDWEAWRPRWAFNWDTKDIYRQRSRALVQKQHPDWLAPRVEAAAQDQFEGAAEEWMAGTLKLGQALRPQGLWGFYNFPECYNYDFKSPNYTGRCPLNICAQNDQLGWLWGQSRALYPSIYLPAALEGTKKTQMFVQHRVAEAFRVAAGAGDPKLPVLPYMQLFYDMTNHFLPAEELEHSLGESAAQGAAGVVLWVSWLSTSTKESCQAIKEYVDTTLGPSILNVTSGARLCSQVLCSGHGRCARRPSYPKARLILNSTSFSIKPTPGGGPLTLQGALSLEDRLRMAVEFECRCYRGWRGTRCEQWGMW

SEQ ID NO: 11 - protein, 553 aa, Bos taurus
  cow PH20 hyaluronidase precursor
  SIGNAL (1)...(35): signal sequence
MRMLRRHHISFRSFAGSSGTPQAVFTFLLLPCCLALDFRAPPLISNTSFLWAWNAPVERCVNRRFQLPPDLRLFSVKGSPQKSATGQFITLFYADRLGYYPHIDEKTGKTVFGGIPQLGNLKSHMEKAKNDIAYYIPNDSVGLAVIDWENWRPTWARNWKPKDVYRDESVELVLQKNPQLSFPEASKIAKVDFETAGKSFMQETLKLGKLLRPNHLWGYYLFPDCYNHNHNQPTYNGNCPDVEKRRNDDLEWLWKESTALFPSVYLNIRLKSTQNAALYVRNRVQEAIRLSKIASVESPLPVFVYARPVFTDGSSTYLSQGDLVNSVGEIVSLGASGIIMWGSLNLSLSMQSCMNLGTYLNTTLNPYIINVTLAAKMCSQVLCHNEGVCTRKHWNSSDYLHLNPMNFAIQTGEGGKYTVPGTVTLEDLQKFSDTFYCSCYANIHCKKRVDIKNVHSVNVCMAEDICIDSPVKLQPSDHSSSQEASTTTFSSISPSTTTATVSPCTPEKHSPECLKVRCSEVIPNVTQKACQSVKLKNISYQSPIQNIKNQTTY

SEQ ID NO: 12 - protein, 331 aa, Vespula vulgaris
  yellow jacket wasp hyaluronidase A
SERPKRVFNIYWNVPTFMCHQYDLYFDEVTNFNIKRNSKDDFQGDKIAIFYDPGEFPALLSLKDGKYKKRNGGVPQEGNITIHLQKFIENLDKIYPNRNFSGIGVIDFERWRPIFRQNWGNMKIHKNFSIDLVRNEHPTWNKKMIELEASKRFEKYARFFMEETLKLAKKTRKQADWGYYGYPYCFNMSPNNLVPECDVTAMHENDKMSWLFNNQNVLLPSVYVRQELTPDQRIGLVQGRVKEAVRISNNLKHSPKVLSYWWYVYQDETNTFLTETDVKKTFQEIVINGGDGIIIWGSSSDVNSLSKCKRLQDYLLTVLGPIAINVTEAVN

SEQ ID NO: 13 - protein, 340 aa, Vespula vulgaris
  yellow jacket wasp hyaluronidase B
DRTIWPKKGFSIYWNIPTHFCHNFGVYFKELKQFNIKYNSMNNFRGETISLFYDPGNFPSMVLLKNGTYEIRNEGVPQKGNLTIHLEQFTKELDEIYPKKIAGGIGVIHFHNWRPIFRRNVDNLKINKDISIDLVRKEHPKWDKSMIEKEASNRFETSAKIFMEKTLKLAKEIRKKTEWGYHGYPHCLSGSTDKPSFDCDALSMSENDKMSWLFNNQNVLLPSIYLKNVLKPDEKIHLVQERLKEAIRISKNFKHLPKVLPYWWYTYQDKESIFLTEADVKNTFKEILTNGADGIIIWGVSYELTDRKRCEKLKEYLMKILGPIAFKVTKAVKENTPLNF

SEQ ID NO: 14 - protein, 382 aa, Apis mellifera
  honey bee hyaluronidase precursor
  SIGNAL (1)...(28): signal sequence
MSRPLVITEGMMIGVLLMLAPINALLLGFVQSTPDNNKTVREFNVYWNVPTFMCHKYGLRFEEVSEKYGILQNWMDKFRGEEIAILYDPGMFPALLKDPNGNVVARNGGVPQLGNLTKHLQVFRDHLINQIPDKSFPGVGVIDFESWRPIFRQNWASLQPYKKLSVEVVRREHPFWDDQRVEQEAKRRFEKYGQLFMEETLKAAKRMRPAANWGYYAYPYCYNLTPNQPSAQCEATTMQENDKMSWLFESEDVLLPSVYLRWNLTSGERVGLVGGRVKEALRIARQMTTSRKKVLPYYWYKYQDRRDTDLSRADLEATLRKITDLGADGFIIWGSSDDINTKAKCLQFREYLNNELGPAVKRIALNNNANDRLTVDVSVDQV

SEQ ID NO: 15 - protein, 331 aa, Dolichovespula maculata
  white-face hornet hyaluronidase
SERPKRVFNIYWNVPTFMCHQYGLYFDEVTNFNIKHNSKDDFQGDKISIFYDPGEFPALLPLKEGNYKIRNGGVPQEGNITIHLQRFIENLDKTYPNRNFNGIGVIDFERWRPIFRQNWGNMMIHKKFSIDLVRNEHPFWDKKMIELEASKRFEKYARLFMEETLKLAKKTRKQADWGYYGYPYCFNMSPNNLVPDCDATAMLENDKMSWLFNNQNVLLPSVYIRHELTPDQRVGLVQGRVKEAVRISNNLKHSPKVLSYWWYVYQDDTNTFLTETDVKKTFQEIAINGGDGIIIWGSSSDVNSLSKCKRLREYLLTVLGPITVNVTETVN

SEQ ID NO: 16 - protein, 367 aa, Polistes annularis
  paper wasp hyaluronidase
  PROPEP (1)...(28): propeptide
YVSLSPDSVFNIITDDISHQILSRSNCERSKRPKRVFSIYWNVPTFMCHQYGMNFDEVTDFNIKHNSKDNFRGETISIYYDPGKFPALMPLKNGNYEERNGGVPQRGNITIHLQQFNEDLDKMTPDKNFGGIGVIDFERWKPIFRQNWGNTEIHKKYSIELVRKEHPKWSESMIEAEATKKFEKYARYFMEETLKLAKKTRKRAKWGYYGFPYCYNVTPNNPGPDCDAKATIENDRLSWMYNNQEILFPSVYVRHEQKPEERVYLVQGRIKEAVRISNNLEHSPSVLAYWWYVYQDKMDIYLSETDVEKTFQEIVTNGGDGIIIWGSSSDVNSLSKCKRLREYLLNTLGPFAVNVTETVNGRSSLNF

SEQ ID NO: 17 - protein, 462 aa, Mus musculus
  mouse hyaluronidase-1
MLGLTQHAQKVWRMKPFSPEVSPGSSPATAGHLLRISTLFLTLLELAQVCRGSVVSNRPFITVWNGDTHWCLTEYGVDVDVSVFDVVANKEQSFQGSNMTIFYREELGTYPYYTPTGEPVFGGLPQNASLVTHLAHTFQDIKAAMPEPDFSGLAVIDWEAWRPRWAFNWDSKDIYRQRSMELVQAEHPDWPETLVEAAAKNQFQEAAEAWMAGTLQLGQVLRPRGLWGYYGFPDCYNNDFLSLNYTGQCPVFVRDQNDQLGWLWNQSYALYPSIYLPAALMGTGKSQMYVRHRVQEALRVAIVSRDPHVPVMPYVQIFYEMTDYLLPLEELEHSLGESAAQGVAGAVLWLSSDKTSTKESCQAIKAYMDSTLGPFIVNVTSAALLCSEALCSGHGRCVRHPSYPEALLTLNPASFSIELTHDGRPPSLKGTLSLKDRAQMAMKFRCRCYRGWRGKWCDKRGM

SEQ ID NO: 18 - protein, 473 aa, Mus musculus
  mouse hyaluronidase-2 precursor
  SIGNAL (1)...(20): signal sequence
MRAGLGPIITLALVLEVAWAGELKPTAPPIFTGRPFVVAWNVPTQECAPRHKVPLDLRAFDVKATPNEGFFNQNITTFYYDRLGLYPRFDAAGTSVHGGVPQNGSLCAHLPMLKESVERYIQTQEPGGLAVIDWEEWRPVWVRNWQEKDVYRQSSRQLVASRHPDWPSDRVMKQAQYEFEFAARQFMLNTLRYVKAVRPQHLWGFYLFPDCYNHDYVQNWESYTGRCPDVEVARNDQLAWLWAESTALFPSVYLDETLASSVHSRNFVSFRVREALRVAHTHHANHALPVYVFTRPTYTRGLTGLSQVDLISTIGESAALGSAGVIFWGDSEDASSMETCQYLKNYLTQLLVPYIVNVSWATQYCSWTQCHGHGRCVRRNPSANTFLHLNASSFRLVPGHTPSEPQLRPEGQLSEADLNYLQKHFRCQCYLGWGGEQCQRNYKGAAGNASRAWAGSHLTSLLGLVAVALTWTL

SEQ ID NO: 19 - protein, 412 aa, Mus musculus
  mouse hyaluronidase-3 precursor
  SIGNAL (1)...(22): signal sequence
MIMHLGLMMVVGLTLCLMHGQALLQVPEHPFSVVWNVPSARCKAHFGVHLPLDALGIVANHGQHFHGQNISIFYKNQFGLYPYFGPRGTAHNGGIPQAVSLDHHLARAAHQILHSLGSSFAGLAVLDWEEWYPLWAGNWGPHRQVYLAASWVWTQQMFPGLDPQEQLHKAHTSFEQAARALMEYTLQLGRTLRPSGLWGFYRYPACGNGWHKMASNYTGHCHAAITTQNTQLRWLWAASSALFPSIYLPPRLPLAYRQAFVRHRLEEAFRVALLEHSHPLPVLAYSRLTHRSSGRFLSLDDLMQTIGVSAALGTAGVVLWGDLSFSSSEEKCWRLHDYLVGTLGPYVINVTKADMACSHQRCHGHGRCARKDPGQMEAFLHLQPDDSLGAWNSFRCHCYSGWAGPTCLEPKP

SEQ ID NO: 20 - protein, 435 aa, Sus scrofa
  pig hyaluronidase-1 precursor
  SIGNAL (1)...(21): signal peptide
MAAHLLPICTLFLNLLSVAQGSRDPVVLNRPFTTIWNANTQWCLKRHGVDVDVSVFEVVVNPGQTFRGPNMTIFYSSQLGTYPYYTSAGEPVFGGLPQNASLDVHLNRTFKDILAAMPESNFSGLAVIDWEAWRPRWAFNWDAKDIYRQRSRALVQKQHPDWPAPWVEAAAQDQFQEAAQTWMAGTLKLGQTLRPHGLWGFYGFPDCYNYDFQSSNYTGQCPPGVSAQNDQLGWLWGQSRALYPSIYLPSALEGTNKTQLYVQHRVNEAFRVAAAAGDPNLPVLPYAQIFHDMTNRLLSREELEHSLGESAAQGAAGVVLWVSWENTRTKESCQSIKEYVDTTLGPFILNVTSGALLCSQAVCSGHGRCVRRPSHTEALPILNPSSFSIKPTPGGGPLTLQGALSLKDRVQMAEEFQCRCYPGWRGTWCEQQGTR

SEQ ID NO: 21 - protein, 419 aa, Sus scrofa
  pig hyaluronidase-3 precursor
  SIGNAL (1)...(16): signal sequence
MTMQLGLALVLGVAMCLGCGQPLLRAPERPFCVLWNVPSARCKARFGVHLPLEALGITANHGQRFHGQNITIFYKSQLGLYPYFGPRGTAHNGGIPQAVSLDHHLARAAYQIHRSLRPGFTGLAVLDWEEWCPLWAGNWGRRQAYQAASCAWAQRVYPNLDPQEQLCKARAGFEEAARALMEDTLRLGRMLRPHGLWGFYHYPACGNGWHGTASNYTGHCHAAALARNTQLYWLWAASSALFPSIYLPPGLPPAYHQAFVRYRLEEAFRVALVGHPHPLPVLAYARLTHRNSGRFLSQDELVQTIGVSAALGASGVVLWGDLSFSSSEEECWHLRGYLVGTLGPYVINVTRAAMACSHQRCHGHGRCAWQDPGQLKVFLHLHPGGSPGAWESFSCRCYWGWAGPTCQEPRPELGPEEAT

SEQ ID NO: 22 - protein, 449 aa, Rattus norvegicus
  rat hyaluronidase-1 precursor
  SIGNAL (1)...(39): signal sequence
MKPFSPEVSPDPCPATAAHLLRTYTLFLTLLELAQGCRGSMVSNRPFITVWNADTHWCLKDHGVDVDVSVFDVVANKEQNFQGPNMTIFYREELGTYPYYTPTGEPVFGGLPQNASLVTHLAHAFQDIKAAMPEPDFSGLAVIDWEAWRPRWAFNWDSKDIYQQRSMELVRAEHPDWPETLVEAEAQGQFQEAAEAWMAGTLQLGQVLRPRGLWGYYGFPDCYNYDFLSPNYTGQCSLSIHDQNDQLGWLWNQSYALYPSIYLPAALMGTGKSQMYVRYRVQEAFRLALVSRDPHVPIMPYVQIFYEKTDYLLPLEELEHSLGESAAQGAAGAVLWISSEKTSTKESCQAIKAYMDSTLGPFILNVTSAALLCSEALCSGRGRCVRHPSYPEALLTLSPASFSIEPTHDGRPLSLKGTLSLKDRAQMAMKFKCRCYRGWSGEWCKKQDM

SEQ ID NO: 23 - protein, 473 aa, Rattus norvegicus
  rat hyaluronidase-2 precursor
  SIGNAL (1)...(20): signal sequence
MRAGLGPIITLALVLEVAWASELKPTAPPIFTGRPFVVAWNVPTQECAPRHKVPLDLRAFDVEATPNEGFFNQNITTFYYDRLGLYPRFDAAGMSVHGGVPQNGSLCAHLPMLKEAVERYIQTQEPAGLAVIDWEEWRPVWVRNWQEKDVYRQSSRQLVASRHPDWPSDRIVKQAQYEFEFAARQFMLNTLRYVKAVRPQHLWGFYLFPDCYNHDYVQNWDSYTGRCPDVEVAQNDQLAWLWAENTALFPSVYLDKTLASSKHSRNFVSFRVQEALRVAHTHHANHALPVYVFTRPTYTRRLTELNQMDLISTIGESAALGSAGVIFWGDSVYASSMENCQNLKKYLTQTLVPYIVNVSWATQYCSWTQCHGHGRCVRRNPSASTFLHLSPSSFRLVPGRTPSEPQLRPEGELSEDDLSYLQMHFRCHCYLGWGGEQCQWNHKRAAGDASRAWAGAHLASLLGLVAMTLTWTL

SEQ ID NO: 24 - protein, 412 aa, Rattus norvegicus
  rat hyaluronidase-3 precursor
  SIGNAL (1)...(22): signal sequence
MITQLGLTLVVGLTLCLVHVQALLQVPEFPFSVLWNVPSARCKTRFGVHLPLDALGIIANHGQRFHGQNITIFYKNQFGLYPYFGPRGTAHNGGIPQAVSLDHHLAQAAHQILHNLGSSFAGLAVLDWEEWYPLWAGNWGTHRQVYQAASWAWAQQMFPDLNPQEQLHKAQTGFEQAARALMEHTLRLGQMLRPHGLWGFYRYPVCGNGWHNMASNYTGHCHPAIITRNTQLRWLWAASSALFPSIYLPPRLPPAYHQTFVRHRLEEAFRVALTGHAHPLPVLAYVRLTHRSSGRFLSLDDLMQTIGVSAALGAAGVVLWGDLSVSSSEEECWRLHDYLVGTLGPYVINVTKAATACSHQRCHGHGRCSWKDPGQMEAFLHLQPDDNLGAWKSFRCRCYLGWSGPTCLEPKP

SEQ ID NO: 25 - protein, 545 aa, Oryctolagus cuniculus
  rabbit hyaluronidase PH-20 precursor
  SIGNAL (1)...(35): signal sequence
MGVLKFKHIFFGSAVELSGVFQIVFIFLLIPCCLTANFRAPPVIPNVPFLWAWNAPTEFCLGKSGEPLDMSLFSLFGSPRKNKTGQGITIFYVDRLGYYPYIDPHTGAIVHGRIPQLGPLQQHLTKLRQEILYYMPKDNVGLAVIDWEEWLPTWLRNWKPKDIYRIKSIELVKSQHPQYNHSYATEKAKRDFEKAGKDFMEETLKLGRLLRPNHLWGYYLFPDCYNHHYDKPNLYKGSCFDIEKKRNDDLSWLWKESTALFPSVYLTSRARSATALSKLYVVRNRVHEAIRVSKIPDDKSPLPNFVYTRLVFTDQIFQFLSHHDLVYTIGEIVALGASGIVVWGSQSLARSMKSCLHLDNYMKTILNPYLINVTLAAKMCNQVLCQEQGVCTRKNWNPNDYLHLNPGNFAIQLGSNGTYKVDGKPTLTDLEQFSKNFQCSCYTNLNCKERTDMNNVRTVNVCAVENVCIDTNVGPQAVTYAPKEKKDVAHILSNTTSINSSTTMSLPFPRKHVSGCLLVLCMYSQYLNICYRLVAIGIQHGYYLK

SEQ ID NO: 26 - protein, 476 aa, Ovis aries
  sheep hyaluronidase-2 precursor
  SIGNAL (1)...(20): signal sequence
MWTGLGPAVTLALVLVVAWATELKPTAPPIFTGRPFVVAWDVPTQDCGPRHKMPLDPKDMKAFDVQASPNEGFVNQNITIFYRDRLGMYPHFNSVGRSVHGGVPQNGSLWVHLEMLKGHVEHYIRTQEPAGLAVIDWEDWRPVWVRNWQDKDVYRRLSRQLVASHHPDWPPERIVKEAQYEFEFAARQFMLETLRFVKAFRPRHLWGFYLFPDCYNHDYVQNWETYTGRCPDVEVSRNDQLSWLWAESTALFPSVYLEETLASSTHGRNFVSFRVQEALRVADVHHANHALPVYVFTRPTYSRGLTGLSEMDLISTIGESAALGAAGVILWGDAGFTTSNETCRRLKDYLTRSLVPYVVNVSWAAQYCSWAQCHGHGRCVRRDPNAHTFLHLSASSFRLVPSHAPDEPRLRPEGELSWADRNHLQTHFRCQCYLGWGGEQCQWDRRRAAGGASGAWAGSHLTGLLAVAVLAFTWTS

SEQ ID NO: 27 - protein, 114 aa, Ovis aries
  sheep sperm membrane protein PH20 (partial sequence)
LYVRNRVREAIRLSKIASVESPLPVFVYHRPVFTDGSSTYLSQGDLVNSVGEIVALGASGIIMWGSLNLSLTMQSCMNLGNYLNTTLNPYIINVTLAAKMCSQVLCQEQGVCIR

SEQ ID NO: 28 - protein, 414 aa, Pongo pygmaeus
  orangutan hyaluronidase-3 precursor
  SIGNAL (1)...(20): signal sequence
MTTRLGPALVLGVALCLGCGQPLPQVPERPFSVLWNVPSAHCKSRFGVHLPLNALGIIANRGQHFHGQNMTIFYKNQLGLYPYFGPKGTAHNGGIPQALPLDRHLALAAYQIHHSLRPGFAGPAVLDWEEWCPLWAGNWGRRRAYQAASWAWAQQVFPDLDPQEQLYKAYTGFEQAARALMEDTLRVAQALRPHGLWGFYHYPACGNGWHSMASNYTGRCHAATLARNTQLHWLWAASSALFPSIYLPPRLPPAHHQAFVRHRLEEAFRVALVGHLPVLAYVRLTHRRSGRFLSQDDLVQTIGVSAALGAAGVVLWGDLSLSSSEEECWHLHDYLVDTLGPYGINVTRAAMACSHQRCHGHGRCARRDPGQMEAFLHLWPDGSLGDWKSFSCHCYWGWAGPTCQEPRLGPKEAV

SEQ ID NO: 29 - protein, 510 aa, Macaca fascicularis
  cynomolgus monkey hyaluronidase PH-20 precursor
  SIGNAL (1)...(35): signal sequence
MGVLKFKHIFFRSFVKSSGVSQIVFTFLLIPCCLTLNFRAPPIIPNVPFLWAWNAPSEFCLGKFNEPLDMSLFTLMGSPRINVTGQGVTIFYVDRLGYYPYIDLTTGVTVHGGIPQKVSLQDHLDKSKQDILFYMPVDNLGMAVIDWEEWRPTWARNWKPKDVYKNRSIELVQQQNVQLSLPQATDKAKQEFEKAGKDFMLETIKLGRSLRPNHLWGYYLFPDCYNHHYRKPGYNGSCFDVEIKRNDDLSWLWNESTALYPSIYLNTQQSVVVATLYVRNRVREAIRVSKIPDAKNPLPVFVYARLVFTDQVLKFLSREELVSTLGETVALGASGIVIWGSLSITRSMKSCLLLDTYMETILNPYIINVTLAAKMCSQVLCQEQGVCIRKDWNSSDYLHLNPDNFDIRLEKGGKFTVHGKPTVEDLEEFSEKFYCSCYTNLSCKEKADVKDTDAVDVCIADGVCIDASLKPPVETEGSPPIFYNTSSSTVSTTMFIVNILFLIISSVASL

SEQ ID NO: 30 - protein, 529 aa, Cavia porcellus
  guinea pig hyaluronidase PH-20 precursor
  SIGNAL (1)...(35): signal sequence
MGAFTFKHSFFGSFVECSGVLQTVFIFLLIPCCLADKRAPPLIPNVPLLWVWNAPTEFCIGGTNQPLDMSFFSIVGTPRKNITGQSITLYYVDRLGYYPYIDPHTGAIVHGGLPQLMNLQQHLRKSRQDILFYMPTDSVGLAVIDWEEWRPTWTRNWRPKDIYRNKSIELVKSQHPQYNHSYAVAVAKRDFERTGKAFMLETLKLGKSLRPSSLWGYYLFPDCYNTHFTKPNYDGHCPPIELQRNNDLQWLWNDSTALYPSVYLTSRVRSSQNGALYVRNRVHESIRVSKLMDDKNPLPIYVYIRLVFTDQTTTFLELDDLVHSVGEIVPLGVSGIIIWGSLSLTRSLVSCIGLENYMKGTLLPYLINVTLAAKMCGQVLCKNQGICTRKDWNTNTYLHLNATNFDIELQQNGKFVVHGKPSLEDLQEFSKNFHCSCYTNVACKDRLDVHNVRSVNVCTANNICIDAVLNFPSLDDDDEPPITDDTSQNQDSISDITSSAPPSSHILPKDLSWCLFLLSIFSQHWKYLL

SEQ ID NO: 31 - protein, 512 aa, Rattus norvegicus
  rat hyaluronidase PH-20 precursor
  SIGNAL (1)...(35): signal sequence
MGELQFKWLFWRSFAESGGTFQTVLIFLFIPYSLTVDYRATPVLSDTTFVWVWNVPTEACVENVTEPIDLSFFSLIGSPRKTAIGQPVTLFYVDRLGNYPHIDAQQTEHHGGIPQKGDLTTHLVKAKEDVERYIPTDKLGLAIIDWEEWRPTWMRNWTPKDIYRNKSIELVQAADPAINITEATVRAKAQFEGAAKEFMEGTLKLGKHIRPKHLWGFYLFPDCYNNKFQVDNYDGQCPDVEKKRNDDLDWLWKESTGLYPSVYLKKDLKSSRKATLYVRYRVLESIRVSKVSDESNPVPIFVYIRLVFTDHVSEYLLEDDLVNTIGEIVAQGTSGIIIWDAMSLAQRSAGCPILRQYMKTTLNPYIVNVTLAAKMCSQTLCKEKGMCSRKTESSDAYLHLDPSSFSINVTEAGKYEVLGKPEVKDLEYFSEHFKCSCFSKMTCEETSDMRSIQDVNVCMGDNVCIKATLGPNSAFHLLPGKGLLLMTTLAHILHHLPHDIFVFPWKMLVSTP

SEQ ID NO: 32 - protein, 512 aa, Mus musculus
  mouse hyaluronidase PH20 precursor
  SIGNAL (1)...(35): signal sequence
MGELRFKHLFWGSFVESGGTFQTVLIFLLIPCSLTVDYRAAPILSNTTFLWIWNVPTERCVGNVNDPIDLSFFSLIGSPRKTATGQPVTLFYVDRLGLYPHIDANQAEHYGGIPQRGDYQAHLRKAKTDIEHYIPDDKLGLAIIDWEEWRPTWLRNWKPKDNYRNKSIELVQSTNPGLSITEATQKAIQQFEEAGRKFMEGTLHLGKFLRPNQLWGYYLFPDCYNNKFQDPKYDGQCPAVEKKRNDNLKWLWKASTGLYPSVYLKKDLKSNRQATLYVRYRVVEAIRVSKVGNASDPVPIFVYIRLVFTDRTSEYLLEDDLVNTIGEIVALGTSGIIIWDAMSLAQRAAGCPILHKYMQTTLNPYIVNVTLAAKMCSQTLCNEKGMCSRRKESSDVYLHLNPSHFDIMLTETGKYEVLGNPRVGDLEYFSEHFKCSCFSRMTCKETSDVKNVQDVNVCVGDNVCIKAKVEPNPAFYLLPGKSLLFMTTLGHVLYHLPQDIFVFPRKTLVSTP

SEQ ID NO: 33 - protein, 807 aa, Staphylococcus aureus
  Staphylococcus aureus subsp. aureus COL hyaluronate lyase
MTYRIKKWQKLSTITLLMAGVITLNGGEFRSVDKHQIAVADTNVQTPDYEKLRNTWLDVNYGYDKYDENNPDMKKKFDATEKEATNLLKEMKTESGRKYLWSGAETLETNSSHMTRTYRNIEKIAEAMRNPKTTLNTDENKKKVKDALEWLHKNAYGKEPDKKVKELSENFTKTTGKNTNLNWWDYEIGTPKSLTNTLILLNDQFSNEEKKKFTAPIKTFAPDSDKILSSVGKAELAKGGNLVDISKVKLLECIIEEDKDMMKKSIDSFNKVFTYVQDSATGKERNGFYKDGSYIDHQDVPYTGAYGVVLLEGISQMMPMIKETPFNDKTQNDTTLKSWIDDGFMPLIYKGEMMDLSRGRAISRENETSHSASATVMKSLLRLSDAMDDSTKAKYKKIVKSSVESDSSYKQNDYLNSYSDIDKMKSLMTDNSISKNGLTQQLKIYNDMDRVTYHNKDLDFAFGLSMTSKNVARYESINGENLKGWHTGAGMSYLYNSDVKHYHDNFWVTADMKRLSGTTTLDNEILKDTDDKKSSKTFVGGTKVDDQHASIGMDFENQDKTLTAKKSYFILNDKIVFLGTGIKSTDSSKNPVTTIENRKANGYTLYTDDKQTTNSDNQENNSVFLESTDTKKNIGYHFLNKPKITVKKESHTGKWKEINKSQKDTQKTDEYYEVTQKHSNSDNKYGYVLYPGLSKDVFKTKKDEVTVVKQEDDFHVVKDNESVWAGVNYSNSTQTFDINNTKVEVKAKGMFILKKKDDNTYECSFYNPESTNSASDIESKISMTGYSITNKNTSTSNESGVHFELTK

SEQ ID NO: 34 - protein, 371 aa, Streptococcus pyogenes
  Streptococcus pyogenes bacteriophage H4489A hyaluronidase
MTENIPLRVQFKRMSADEWARSDVILLEGEIGFETDTGFAKFGDGQNTFSKLKYLTGPKGPKGDTGLQGKTGGTGPRGPAGKPGTTDYDQLQNKPDLGAFAQKEETNSKITKLESSKADKSAVYSKAESKIELDKKLSLTGGIVTGQLQFKPNKSGIKPSSSVGGAINIDMSKSEGAAMVMYTNKDTTDGPLMILRSDKDTFDQSAQFVDYSGKTNAVNIVMRQPSAPNFSSALNITSANEGGSAMQIRGVEKALGTLKITHENPNVEAKYDENAAALSIDIVKKQKGGKGTAAQGIYINSTSGTAGKMLRIRNKNEDKFYVGPDGGFHSGANSTVAGNLTVKDPTSGKHAATKDYVDEKIAELKKLILKK

SEQ ID NO: 35 - protein, 1628 aa, Clostridium perfringens
  Clostridium perfringens str. 13 hyaluronidase
MNKNIRKIITSTVLAAMTISVLPSNLVVFATDGITENFYEIYPKPQEISYSGGEFQISDEINIVYDDGIDTYTKKRVDEVLEASNLEATVSNEIVPGKTNFLVGINESGGVVDNYFNKNIPHDESFFDEKMDANIVSVKDGVIGVIGEDTDSAFYGVTTLKHVFNQLEEGNKIQSFRADDYAEVAHRGFIEGYYGNPWSNEDRAELMKFGGDYKLNQYVFAPKDDPYHNSKWRDLYPEEKLSEIKKLAQVGNETKNRYVYALHPFMNNPVRFDTEENYQNDLGVIKAKFTQLLENDVRQFAILADDASAPAQGASMYVKLLTDLTRWLEEQQSTYPDLKTDLMFCPSDYYGNGSSAQLKELNKAEDNVSIVMTGGRIWGEVDENFANNFMNNISTEGHPGRAPFFWINWPCSDNSKQHLIMGGNDTFLHPGVDPSKIDGIVLNPMQQAEANKSALFAIADYAWNIWDNKEEADENWNDSFKYMDHGTAEETNSSLALREISKHMINQNMDGRVRPLQESVELAPKLEAFKQKYDSGASIKEDALELIAEFTNLQKAADYYKNNPGNERTRDQIIYWLNCWEDTMDAAIGYLKSAIAIEEGDDEAAWANYSEAQGAFEKSKTYGFHYVDHTEYAEVGVQHIVPFIKSMGQNLSVVIGSIVDPNRIIATYISNRQDAPTGNPDNIFDNNASTELVYKNPNRIDVGTYVGVKYSNPITLNNVEFLMGANSNPNDTMQKAKIQYTVDGREWIDLEEGVEYTMPGAIKVENLDLKVRGVRLIATEARENTWLGVRDINVNKKEDSNSGVEFNPSLIRSESWQVYEGNEANLLDGDDNTGVWYKTLNGDTSLAGEFIGLDLGKEIKLDGIRFVIGKNGGGSSDKWNKFKLEYSLDNESWTTIKEYDKTGAPAGKDVIEESFETPISAKYIRLTNMENINKWLTFSEFAIISDELENAGNKENVYTNTELDLLSLAKEDVTKLIPTDDISLNHGEYIGVKLNRIKDLSNINLEISNDTGLKLQSSMNGVEWTEITDKNTLEDGRYVRLINTSNEAVNFNLTKFEVNSNEVYEPSLVDAYVGDDGAKKAVDGDLKTRVKFLGAPSTGDTIVYDLGQEILVDNLKYVVLDTEVDHVRDGKIQLSLDGETWTDAITIGDGVENGVDDMFSTPLKNGYKHGNQSGGIVPIDSAYVEGDNLNQKARYVRILFTAPYRHRWTVINELMINNGEYISTVNDPTYISNPIEERGFAPSNLRDGNLTTSYKPNTNNGEISEGSITYRLSEKTDVRKVTIVQSGSSISNAKVMARVGDGSENVTDQWVQLGTLSNSLNEFINRDYNNIYEIKIEWTDVAPNIYEIITLNQEFEFPVNDSLKAKYDELINLSGDEYTLSSFETLKEALNEAKSILDDSNSSQKKIDKALEKLNKAEERLDLRATDFEDFNKVLTLGNSLVEEEYTAESWALFSEVLEAANEANKNKADYTQDQINQIVIDLDASIKALVKETPEVDKTNLGELINQGKSLLDESVEGFNVGEYHKGAKDGLTVEINKAEEVFNKEDATEEEINLAKESLEGAIARFNSLLIEESTGDFNGNGKIDIGDLAMVSKNIGSTTNTSLDLNKDGSIDEYEISFINHRILN

SEQ ID NO: 36 - protein, 435 aa, Homo sapiens
  human hyaluronidase-1 precursor
  SIGNAL (1)...(21): signal sequence
MAAHLLPICALFLTLLDMAQGFRGPLLPNRPFTTVWNANTQWCLERHGVDVDVSVFDVVANPGQTFRGPDMTIFYSSQLGTYPYYTPTGEPVFGGLPQNASLIAHLARTFQDILAAIPAPDFSGLAVIDWEAWRPRWAFNWDTKDIYRQRSRALVQAQHPDWPAPQVEAVAQDQFQGAARAWMAGTLQLGRALRPRGLWGFYGFPDCYNYDFLSPNYTGQCPSGIRAQNDQLGWLWGQSRALYPSIYMPAVLEGTGKSQMYVQHRVAEAFRVAVAAGDPNLPVLPYVQIFYDTTNHFLPLDELEHSLGESAAQGAAGVVLWVSWENTRTKESCQAIKEYMDTTLGPFILNVTSGALLCSQALCSGHGRCVRRTSHPKALLLLNPASFSIQLTPGGGPLSLRGALSLEDQAQMAVEFKCRCYPGWQAPWCERKSMW

SEQ ID NO: 37 - protein, 473 aa, Homo sapiens
  human hyaluronidase-2 precursor
  SIGNAL (1)...(20): signal sequence
MRAGPGPTVTLALVLAVAWAMELKPTAPPIFTGRPFVVAWDVPTQDCGPRLKVPLDLNAFDVQASPNEGFVNQNITIFYRDRLGLYPRFDSAGRSVHGGVPQNVSLWAHRKMLQKRVEHYIRTQESAGLAVIDWEDWRPVWVRNWQDKDVYRRLSRQLVASRHPDWPPDRIVKQAQYEFEFAAQQFMLETLRYVKAVRPRHLWGFYLFPDCYNHDYVQNWESYTGRCPDVEVARNDQLAWLWAESTALFPSVYLDETLASSRHGRNFVSFRVQEALRVARTHHANHALPVYVFTRPTYSRRLTGLSEMDLISTIGESAALGAAGVILWGDAGYTTSTETCQYLKDYLTRLLVPYVVNVSWATQYCSRAQCHGHGRCVRRNPSASTFLHLSTNSFRLVPGHAPGEPQLRPVGELSWADIDHLQTHFRCQCYLGWSGEQCQWDHRQAAGGASEAWAGSHLTSLLALAALAFTWTL

SEQ ID NO: 38 - protein, 417 aa, Homo sapiens
  human hyaluronidase-3 precursor
  SIGNAL (1)...(20): signal sequence
MTTQLGPALVLGVALCLGCGQPLPQVPERPFSVLWNVPSAHCEARFGVHLPLNALGIIANRGQHFHGQNMTIFYKNQLGLYPYFGPRGTAHNGGIPQALPLDRHLALAAYQIHHSLRPGFAGPAVLDWEEWCPLWAGNWGRRRAYQAASWAWAQQVFPDLDPQEQLYKAYTGFEQAARALMEDTLRVAQALRPHGLWGFYHYPACGNGWHSMASNYTGRCHAATLARNTQLHWLWAASSALFPSIYLPPRLPPAHHQAFVRHRLEEAFRVALVGHRHPLPVLAYVRLTHRRSGRFLSQDDLVQSIGVSAALGAAGVVLWGDLSLSSSEEECWHLHDYLVDTLGPYVINVTRAAMACSHQRCHGHGRCARRDPGQMEAFLHLWPDGSLGDWKSFSCHCYWGWAGPTCQEPRPGPKEAV

SEQ ID NO: 39 - protein, 481 aa, Homo sapiens
  human hyaluronidase-4
MKVLSEGQLKLCVVQPVHLTSWLLIFFILKSISCLKPARLPIYQRKPFIAAWNAPTDQCLIKYNLRLNLKMFPVIGSPLAKARGQNVTIFYVNRLGYYPWYTSQGVPINGGLPQNISLQVHLEKADQDINYYIPAEDFSGLAVIDWEYWRPQWARNWNSKDVYRQKSRKLISDMGKNVSATDIEYLAKVTFEESAKAFMKETIKLGIKSRPKGLWGYYLYPDCHNYNVYAPNYSGSCPEDEVLRNNELSWLWNSSAALYPSIGVWKSLGDSENILRFSKFRVHESMRISTMTSHDYALPVFVYTRLGYRDEPLFFLSKQDLVSTIGESAALGAAGIVIWGDMNLTASKANCTKVKQFVSSDLGSYIANVTRAAEVCSLHLCRNNGRCIRKMWNAPSYLHLNPASYHIEASEDGEFTVKGKASDTDLAVMADTFSCHCYQGYEGADCREIKTADGCSGVSPSPGSLMTLCLLLLASYRSIQL

SEQ ID NO: 40 - protein, 467 aa, Homo sapiens
  precursor soluble human PH20, amino acid residues 1-467
  SIGNAL (1)...(35): signal sequence
MGVLKFKHIFFRSFVKSSGVSQIVFTFLLIPCCLTLNFRAPPVIPNVPFLWAWNAPSEFCLGKFDEPLDMSLFSFIGSPRINATGQGVTIFYVDRLGYYPYIDSITGVTVNGGIPQKISLQDHLDKAKKDITFYMPVDNLGMAVIDWEEWRPTWARNWKPKDVYKNRSIELVQQQNVQLSLTEATEKAKQEFEKAGKDFLVETIKLGKLLRPNHLWGYYLFPDCYNHHYKKPGYNGSCFNVEIKRNDDLSWLWNESTALYPSIYLNTQQSPVAATLYVRNRVREAIRVSKIPDAKSPLPVFAYTRIVFTDQVLKFLSQDELVYTFGETVALGASGIVIWGTLSIMRSMKSCLLLDNYMETILNPYIINVTLAAKMCSQVLCQEQGVCIRKNWNSSDYLHLNPDNFAIQLEKGGKFTVRGKPTLEDLEQFSEKFYCSCYSTLSCKEKADVKDTDAVDVCIADGVCIDA

SEQ ID NO: 41 - protein, 477 aa, Homo sapiens
  precursor soluble human PH20, amino acid residues 1-477
  SIGNAL (1)...(35): signal sequence
MGVLKFKHIFFRSFVKSSGVSQIVFTFLLIPCCLTLNFRAPPVIPNVPFLWAWNAPSEFCLGKFDEPLDMSLFSFIGSPRINATGQGVTIFYVDRLGYYPYIDSITGVTVNGGIPQKISLQDHLDKAKKDITFYMPVDNLGMAVIDWEEWRPTWARNWKPKDVYKNRSIELVQQQNVQLSLTEATEKAKQEFEKAGKDFLVETIKLGKLLRPNHLWGYYLFPDCYNHHYKKPGYNGSCFNVEIKRNDDLSWLWNESTALYPSIYLNTQQSPVAATLYVRNRVREAIRVSKIPDAKSPLPVFAYTRIVFTDQVLKFLSQDELVYTFGETVALGASGIVIWGTLSIMRSMKSCLLLDNYMETILNPYIINVTLAAKMCSQVLCQEQGVCIRKNWNSSDYLHLNPDNFAIQLEKGGKFTVRGKPTLEDLEQFSEKFYCSCYSTLSCKEKADVKDTDAVDVCIADGVCIDAFLKPPMETEE

SEQ ID NO: 42 - protein, 478 aa, Homo sapiens
  precursor soluble human PH20, amino acid residues 1-478
  SIGNAL (1)...(35): signal sequence
MGVLKFKHIFFRSFVKSSGVSQIVFTFLLIPCCLTLNFRAPPVIPNVPFLWAWNAPSEFCLGKFDEPLDMSLFSFIGSPRINATGQGVTIFYVDRLGYYPYIDSITGVTVNGGIPQKISLQDHLDKAKKDITFYMPVDNLGMAVIDWEEWRPTWARNWKPKDVYKNRSIELVQQQNVQLSLTEATEKAKQEFEKAGKDFLVETIKLGKLLRPNHLWGYYLFPDCYNHHYKKPGYNGSCFNVEIKRNDDLSWLWNESTALYPSIYLNTQQSPVAATLYVRNRVREAIRVSKIPDAKSPLPVFAYTRIVFTDQVLKFLSQDELVYTFGETVALGASGIVIWGTLSIMRSMKSCLLLDNYMETILNPYIINVTLAAKMCSQVLCQEQGVCIRKNWNSSDYLHLNPDNFAIQLEKGGKFTVRGKPTLEDLEQFSEKFYCSCYSTLSCKEKADVKDTDAVDVCIADGVCIDAFLKPPMETEEP

SEQ ID NO: 43 - protein, 479 aa, Homo sapiens
  precursor soluble human PH20, amino acid residues 1-479
  SIGNAL (1)...(35): signal sequence
MGVLKFKHIFFRSFVKSSGVSQIVFTFLLIPCCLTLNFRAPPVIPNVPFLWAWNAPSEFCLGKFDEPLDMSLFSFIGSPRINATGQGVTIFYVDRLGYYPYIDSITGVTVNGGIPQKISLQDHLDKAKKDITFYMPVDNLGMAVIDWEEWRPTWARNWKPKDVYKNRSIELVQQQNVQLSLTEATEKAKQEFEKAGKDFLVETIKLGKLLRPNHLWGYYLFPDCYNHHYKKPGYNGSCFNVEIKRNDDLSWLWNESTALYPSIYLNTQQSPVAATLYVRNRVREAIRVSKIPDAKSPLPVFAYTRIVFTDQVLKFLSQDELVYTFGETVALGASGIVIWGTLSIMRSMKSCLLLDNYMETILNPYIINVTLAAKMCSQVLCQEQGVCIRKNWNSSDYLHLNPDNFAIQLEKGGKFTVRGKPTLEDLEQFSEKFYCSCYSTLSCKEKADVKDTDAVDVCIADGVCIDAFLKPPMETEEPQ

SEQ ID NO: 44 - protein, 480 aa, Homo sapiens
  precursor soluble human PH20, amino acid residues 1-480
  SIGNAL (1)...(35): signal sequence
MGVLKFKHIFFRSFVKSSGVSQIVFTFLLIPCCLTLNFRAPPVIPNVPFLWAWNAPSEFCLGKFDEPLDMSLFSFIGSPRINATGQGVTIFYVDRLGYYPYIDSITGVTVNGGIPQKISLQDHLDKAKKDITFYMPVDNLGMAVIDWEEWRPTWARNWKPKDVYKNRSIELVQQQNVQLSLTEATEKAKQEFEKAGKDFLVETIKLGKLLRPNHLWGYYLFPDCYNHHYKKPGYNGSCFNVEIKRNDDLSWLWNESTALYPSIYLNTQQSPVAATLYVRNRVREAIRVSKIPDAKSPLPVFAYTRIVFTDQVLKFLSQDELVYTFGETVALGASGIVIWGTLSIMRSMKSCLLLDNYMETILNPYIINVTLAAKMCSQVLCQEQGVCIRKNWNSSDYLHLNPDNFAIQLEKGGKFTVRGKPTLEDLEQFSEKFYCSCYSTLSCKEKADVKDTDAVDVCIADGVCIDAFLKPPMETEEPQI

SEQ ID NO: 45 - protein, 481 aa, Homo sapiens
  precursor soluble human PH20, amino acid residues 1-481
  SIGNAL (1)...(35): signal sequence
MGVLKFKHIFFRSFVKSSGVSQIVFTFLLIPCCLTLNFRAPPVIPNVPFLWAWNAPSEFCLGKFDEPLDMSLFSFIGSPRINATGQGVTIFYVDRLGYYPYIDSITGVTVNGGIPQKISLQDHLDKAKKDITFYMPVDNLGMAVIDWEEWRPTWARNWKPKDVYKNRSIELVQQQNVQLSLTEATEKAKQEFEKAGKDFLVETIKLGKLLRPNHLWGYYLFPDCYNHHYKKPGYNGSCFNVEIKRNDDLSWLWNESTALYPSIYLNTQQSPVAATLYVRNRVREAIRVSKIPDAKSPLPVFAYTRIVFTDQVLKFLSQDELVYTFGETVALGASGIVIWGTLSIMRSMKSCLLLDNYMETILNPYIINVTLAAKMCSQVLCQEQGVCIRKNWNSSDYLHLNPDNFAIQLEKGGKFTVRGKPTLEDLEQFSEKFYCSCYSTLSCKEKADVKDTDAVDVCIADGVCIDAFLKPPMETEEPQIF

SEQ ID NO: 46 - protein, 483 aa, Homo sapiens
  precursor soluble human PH20, amino acid residues 1-483
  SIGNAL (1)...(35): signal sequence
MGVLKFKHIFFRSFVKSSGVSQIVFTFLLIPCCLTLNFRAPPVIPNVPFLWAWNAPSEFCLGKFDEPLDMSLFSFIGSPRINATGQGVTIFYVDRLGYYPYIDSITGVTVNGGIPQKISLQDHLDKAKKDITFYMPVDNLGMAVIDWEEWRPTWARNWKPKDVYKNRSIELVQQQNVQLSLTEATEKAKQEFEKAGKDFLVETIKLGKLLRPNHLWGYYLFPDCYNHHYKKPGYNGSCFNVEIKRNDDLSWLWNESTALYPSIYLNTQQSPVAATLYVRNRVREAIRVSKIPDAKSPLPVFAYTRIVFTDQVLKFLSQDELVYTFGETVALGASGIVIWGTLSIMRSMKSCLLLDNYMETILNPYIINVTLAAKMCSQVLCQEQGVCIRKNWNSSDYLHLNPDNFAIQLEKGGKFTVRGKPTLEDLEQFSEKFYCSCYSTLSCKEKADVKDTDAVDVCIADGVCIDAFLKPPMETEEPQIFYN

SEQ ID NO: 47 - protein, 432 aa, Homo sapiens
  mature soluble human PH20, amino acid residues 36-467
LNFRAPPVIPNVPFLWAWNAPSEFCLGKFDEPLDMSLFSFIGSPRINATGQGVTIFYVDRLGYYPYIDSITGVTVNGGIPQKISLQDHLDKAKKDITFYMPVDNLGMAVIDWEEWRPTWARNWKPKDVYKNRSIELVQQQNVQLSLTEATEKAKQEFEKAGKDFLVETIKLGKLLRPNHLWGYYLFPDCYNHHYKKPGYNGSCFNVEIKRNDDLSWLWNESTALYPSIYLNTQQSPVAATLYVRNRVREAIRVSKIPDAKSPLPVFAYTRIVFTDQVLKFLSQDELVYTFGETVALGASGIVIWGTLSIMRSMKSCLLLDNYMETILNPYIINVTLAAKMCSQVLCQEQGVCIRKNWNSSDYLHLNPDNFAIQLEKGGKFTVRGKPTLEDLEQFSEKFYCSCYSTLSCKEKADVKDTDAVDVCIADGVCIDA

SEQ ID NO: 48 - protein, 448 aa, Homo sapiens
  mature soluble human PH20, amino acid residues 36-483
LNFRAPPVIPNVPFLWAWNAPSEFCLGKFDEPLDMSLFSFIGSPRINATGQGVTIFYVDRLGYYPYIDSITGVTVNGGIPQKISLQDHLDKAKKDITFYMPVDNLGMAVIDWEEWRPTWARNWKPKDVYKNRSIELVQQQNVQLSLTEATEKAKQEFEKAGKDFLVETIKLGKLLRPNHLWGYYLFPDCYNHHYKKPGYNGSCFNVEIKRNDDLSWLWNESTALYPSIYLNTQQSPVAATLYVRNRVREAIRVSKIPDAKSPLPVFAYTRIVFTDQVLKFLSQDELVYTFGETVALGASGIVIWGTLSIMRSMKSCLLLDNYMETILNPYIINVTLAAKMCSQVLCQEQGVCIRKNWNSSDYLHLNPDNFAIQLEKGGKFTVRGKPTLEDLEQFSEKFYCSCYSTLSCKEKADVKDTDAVDVCIADGVCIDAFLKPPMETEEPQIFYN

SEQ ID NO: 49 - DNA, 1446 bp, Homo sapiens
  DNA encoding soluble human PH20 precursor
atgggagtgctaaaattcaagcacatctttttcagaagctttgttaaatcaagtggagtatcccagatagttttcaccttccttctgattccatgttgcttgactctgaatttcagagcacctcctgttattccaaatgtgcctttcctctgggcctggaatgccccaagtgaattttgtcttggaaaatttgatgagccactagatatgagcctcttctctttcataggaagcccccgaataaacgccaccgggcaaggtgttacaatattttatgttgatagacttggctactatccttacatagattcaatcacaggagtaactgtgaatggaggaatcccccagaagatttccttacaagaccatctggacaaagctaagaaagacattacattttatatgccagtagacaatttgggaatggctgttattgactgggaagaatggagacccacttgggcaagaaactggaaacctaaagatgtttacaagaataggtctattgaattggttcagcaacaaaatgtacaacttagtctcacagaggccactgagaaagcaaaacaagaatttgaaaaggcagggaaggatttcctggtagagactataaaattgggaaaattacttcggccaaatcacttgtggggttattatctttttccggattgttacaaccatcactataagaaacccggttacaatggaagttgcttcaatgtagaaataaaaagaaatgatgatctcagctggttgtggaatgaaagcactgctctttacccatccatttatttgaacactcagcagtctcctgtagctgctacactctatgtgcgcaatcgagttcgggaagccatcagagtttccaaaatacctgatgcaaaaagtccacttccggtttttgcatatacccgcatagtttttactgatcaagttttgaaattcctttctcaagatgaacttgtgtatacatttggcgaaactgttgctctgggtgcttctggaattgtaatatggggaaccctcagtataatgcgaagtatgaaatcttgcttgctcctagacaattacatggagactatactgaatccttacataatcaacgtcacactagcagccaaaatgtgtagccaagtgctttgccaggagcaaggagtgtgtataaggaaaaactggaattcaagtgactatcttcacctcaacccagataattttgctattcaacttgagaaaggtggaaagttcacagtacgtggaaaaccgacacttgaagacctggagcaattttctgaaaaattttattgcagctgttatagcaccttgagttgtaaggagaaagctgatgtaaaagacactgatgctgttgatgtgtgtattgctgatggtgtctgtatagatgcttttctaaaacctcccatggagacagaagaacctcaaattttctac

SEQ ID NO: 50 - protein, 509 aa, Homo sapiens
  precursor human PH20 variant P48A
  SIGNAL (1)...(35): signal sequence
MGVLKFKHIFFRSFVKSSGVSQIVFTFLLIPCCLTLNFRAPPVIPNVAFLWAWNAPSEFCLGKFDEPLDMSLFSFIGSPRINATGQGVTIFYVDRLGYYPYIDSITGVTVNGGIPQKISLQDHLDKAKKDITFYMPVDNLGMAVIDWEEWRPTWARNWKPKDVYKNRSIELVQQQNVQLSLTEATEKAKQEFEKAGKDFLVETIKLGKLLRPNHLWGYYLFPDCYNHHYKKPGYNGSCFNVEIKRNDDLSWLWNESTALYPSIYLNTQQSPVAATLYVRNRVREAIRVSKIPDAKSPLPVFAYTRIVFTDQVLKFLSQDELVYTFGETVALGASGIVIWGTLSIMRSMKSCLLLDNYMETILNPYIINVTLAAKMCSQVLCQEQGVCIRKNWNSSDYLHLNPDNFAIQLEKGGKFTVRGKPTLEDLEQFSEKFYCSCYSTLSCKEKADVKDTDAVDVCIADGVCIDAFLKPPMETEEPQIFYNASPSTLSATMFIVSILFLIISSVASL

SEQ ID NO: 51 - protein, 509 aa, Homo sapiens
  precursor human PH20 variant L499W
  SIGNAL (1)...(35): signal sequence
MGVLKFKHIFFRSFVKSSGVSQIVFTFLLIPCCLTLNFRAPPVIPNVPFLWAWNAPSEFCLGKFDEPLDMSLFSFIGSPRINATGQGVTIFYVDRLGYYPYIDSITGVTVNGGIPQKISLQDHLDKAKKDITFYMPVDNLGMAVIDWEEWRPTWARNWKPKDVYKNRSIELVQQQNVQLSLTEATEKAKQEFEKAGKDFLVETIKLGKLLRPNHLWGYYLFPDCYNHHYKKPGYNGSCFNVEIKRNDDLSWLWNESTALYPSIYLNTQQSPVAATLYVRNRVREAIRVSKIPDAKSPLPVFAYTRIVFTDQVLKFLSQDELVYTFGETVALGASGIVIWGTLSIMRSMKSCLLLDNYMETILNPYIINVTLAAKMCSQVLCQEQGVCIRKNWNSSDYLHLNPDNFAIQLEKGGKFTVRGKPTLEDLEQFSEKFYCSCYSTLSCKEKADVKDTDAVDVCIADGVCIDAFLKPPMETEEPQIFYNASPSTLSATMFIVSIWFLIISSVASL

SEQ ID NO: 52 - DNA, 6630 bp, Artificial Sequence
  HZ24 vector
tcaatattggccattagccatattattcattggttatatagcataaatcaatattggctattggccattgcatacgttgtatctatatcataatatgtacatttatattggctcatgtccaatatgaccgccatgttggcattgattattgactagttattaatagtaatcaattacggggtcattagttcatagcccatatatggagttccgcgttacataacttacggtaaatggcccgcctggctgaccgcccaacgacccccgcccattgacgtcaataatgacgtatgttcccatagtaacgccaatagggactttccattgacgtcaatgggtggagtatttacggtaaactgcccacttggcagtacatcaagtgtatcatatgccaagtccgccccctattgacgtcaatgacggtaaatggcccgcctggcattatgcccagtacatgaccttacgggactttcctacttggcagtacatctacgtattagtcatcgctattaccatggtgatgcggttttggcagtacaccaatgggcgtggatagcggtttgactcacggggatttccaagtctccaccccattgacgtcaatgggagtttgttttggcaccaaaatcaacgggactttccaaaatgtcgtaataaccccgccccgttgacgcaaatgggcggtaggcgtgtacggtgggaggtctatataagcagagctcgtttagtgaaccgtcagatcactagaagctttattgcggtagtttatcacagttaaattgctaacgcagtcagtgcttctgacacaacagtctcgaacttaagctgcagaagttggtcgtgaggcactgggcaggtaagtatcaaggttacaagacaggtttaaggagaccaatagaaactgggcttgtcgagacagagaagactcttgcgtttctgataggcacctattggtcttactgacatccactttgcctttctctccacaggtgtccactcccagttcaattacagctcttaaggctagagtacttaatacgactcactataggctagcatgggagtgctaaaattcaagcacatctttttcagaagctttgttaaatcaagtggagtatcccagatagttttcaccttccttctgattccatgttgcttgactctgaatttcagagcacctcctgttattccaaatgtgcctttcctctgggcctggaatgccccaagtgaattttgtcttggaaaatttgatgagccactagatatgagcctcttctctttcataggaagcccccgaataaacgccaccgggcaaggtgttacaatattttatgttgatagacttggctactatccttacatagattcaatcacaggagtaactgtgaatggaggaatcccccagaagatttccttacaagaccatctggacaaagctaagaaagacattacattttatatgccagtagacaatttgggaatggctgttattgactgggaagaatggagacccacttgggcaagaaactggaaacctaaagatgtttacaagaataggtctattgaattggttcagcaacaaaatgtacaacttagtctcacagaggccactgagaaagcaaaacaagaatttgaaaaggcagggaaggatttcctggtagagactataaaattgggaaaattacttcggccaaatcacttgtggggttattatctttttccggattgttacaaccatcactataagaaacccggttacaatggaagttgcttcaatgtagaaataaaaagaaatgatgatctcagctggttgtggaatgaaagcactgctctttacccatccatttatttgaacactcagcagtctcctgtagctgctacactctatgtgcgcaatcgagttcgggaagccatcagagtttccaaaatacctgatgcaaaaagtccacttccggtttttgcatatacccgcatagtttttactgatcaagttttgaaattcctttctcaagatgaacttgtgtatacatttggcgaaactgttgctctgggtgcttctggaattgtaatatggggaaccctcagtataatgcgaagtatgaaatcttgcttgctcctagacaattacatggagactatactgaatccttacataatcaacgtcacactagcagccaaaatgtgtagccaagtgctttgccaggagcaaggagtgtgtataaggaaaaactggaattcaagtgactatcttcacctcaacccagataattttgctattcaacttgagaaaggtggaaagttcacagtacgtggaaaaccgacacttgaagacctggagcaattttctgaaaaattttattgcagctgttatagcaccttgagttgtaaggagaaagctgatgtaaaagacactgatgctgttgatgtgtgtattgctgatggtgtctgtatagatgcttttctaaaacctcccatggagacagaagaacctcaaattttctactgaggatccatagctaacgcccctctccctcccccccccctaacgttactggccgaagccgcttggaataaggccggtgtgcgtttgtctatatgttattttccaccatattgccgtcttttggcaatgtgagggcccggaaacctggccctgtcttcttgacgagcattcctaggggtctttcccctctcgccaaaggaatgcaaggtctgttgaatgtcgtgaaggaagcagttcctctggaagcttcttgaagacaaacaacgtctgtagcgaccctttgcaggcagcggaaccccccacctggcgacaggtgcctctgcggccaaaagccacgtgtataagatacacctgcaaaggcggcacaaccccagtgccacgttgtgagttggatagttgtggaaagagtcaaatggctctcctcaagcgtattcaacaaggggctgaaggatgcccagaaggtaccccattgtatgggatctgatctggggcctcggtgcacatgctttacatgtgtttagtcgaggttaaaaaaacgtctaggccccccgaaccacggggacgtggttttcctttgaaaaacacgatgataagcttgccacaacccacagcggccgctgccatcatggttcgaccattgaactgcatcgtcgccgtgtcccaaaatatggggattggcaagaacggagacctaccctggcctccgctcaggaacgagttcaagtacttccaaagaatgaccacaacctcttcagtggaaggtaaacagaatctggtgattatgggtaggaaaacctggttctccattcctgagaagaatcgacctttaaaggacagaattaatatagttctcagtagagaactcaaagaaccaccacgaggagctcattttcttgccaaaagtttggatgatgccttaagacttattgaacaaccggaattggcaagtaaagtagacatggtttggatagtcggaggcagttctgtttaccaggaagccatgaatcaaccaggccacctcagactctttgtgacaaggatcatgcaggaatttgaaagtgacacgtttttcccagaaattgatttggggaaatataaacttctcccagaatacccaggcgtcctctctgaggtccaggaggaaaaaggcatcaagtataagtttgaagtctacgagaagaaagactaaacgcgtggtacctctagagtcgacccgggcggccgcttcgagcagacatgataagatacattgatgagtttggacaaaccacaactagaatgcagtgaaaaaaatgctttatttgtgaaatttgtgatgctattgctttatttgtaaccattataagctgcaataaacaagttaacaacaacaattgcattcattttatgtttcaggttcagggggagatgtgggaggttttttaaagcaagtaaaacctctacaaatgtggtaaaatcgataaggatccgggctggcgtaatagcgaagaggcccgcaccgatcgcccttcccaacagttgcgcagcctgaatggcgaatggacgcgccctgtagcggcgcattaagcgcggcgggtgtggtggttacgcgcagcgtgaccgctacacttgccagcgccctagcgcccgctcctttcgctttcttcccttcctttctcgccacgttcgccggctttccccgtcaagctctaaatcgggggctccctttagggttccgatttagtgctttacggcacctcgaccccaaaaaacttgattagggtgatggttcacgtagtgggccatcgccctgatagacggtttttcgccctttgacgttggagtccacgttctttaatagtggactcttgttccaaactggaacaacactcaaccctatctcggtctattcttttgatttataagggattttgccgatttcggcctattggttaaaaaatgagctgatttaacaaaaatttaacgcgaattttaacaaaatattaacgcttacaatttcctgatgcggtattttctccttacgcatctgtgcggtatttcacaccgcatatggtgcactctcagtacaatctgctctgatgccgcatagttaagccagccccgacacccgccaacacccgctgacgcgccctgacgggcttgtctgctcccggcatccgcttacagacaagctgtgaccgtctccgggagctgcatgtgtcagaggttttcaccgtcatcaccgaaacgcgcgagacgaaagggcctcgtgatacgcctatttttataggttaatgtcatgataataatggtttcttagacgtcaggtggcacttttcggggaaatgtgcgcggaacccctatttgtttatttttctaaatacattcaaatatgtatccgctcatgagacaataaccctgataaatgcttcaataatattgaaaaaggaagagtatgagtattcaacatttccgtgtcgcccttattcccttttttgcggcattttgccttcctgtttttgctcacccagaaacgctggtgaaagtaaaagatgctgaagatcagttgggtgcacgagtgggttacatcgaactggatctcaacagcggtaagatccttgagagttttcgccccgaagaacgttttccaatgatgagcacttttaaagttctgctatgtggcgcggtattatcccgtattgacgccgggcaagagcaactcggtcgccgcatacactattctcagaatgacttggttgagtactcaccagtcacagaaaagcatcttacggatggcatgacagtaagagaattatgcagtgctgccataaccatgagtgataacactgcggccaacttacttctgacaacgatcggaggaccgaaggagctaaccgcttttttgcacaacatgggggatcatgtaactcgccttgatcgttgggaaccggagctgaatgaagccataccaaacgacgagcgtgacaccacgatgcctgtagcaatggcaacaacgttgcgcaaactattaactggcgaactacttactctagcttcccggcaacaattaatagactggatggaggcggataaagttgcaggaccacttctgcgctcggcccttccggctggctggtttattgctgataaatctggagccggtgagcgtgggtctcgcggtatcattgcagcactggggccagatggtaagccctcccgtatcgtagttatctacacgacggggagtcaggcaactatggatgaacgaaatagacagatcgctgagataggtgcctcactgattaagcattggtaactgtcagaccaagtttactcatatatactttagattgatttaaaacttcatttttaatttaaaaggatctaggtgaagatcctttttgataatctcatgaccaaaatcccttaacgtgagttttcgttccactgagcgtcagaccccgtagaaaagatcaaaggatcttcttgagatcctttttttctgcgcgtaatctgctgcttgcaaacaaaaaaaccaccgctaccagcggtggtttgtttgccggatcaagagctaccaactctttttccgaaggtaactggcttcagcagagcgcagataccaaatactgttcttctagtgtagccgtagttaggccaccacttcaagaactctgtagcaccgcctacatacctcgctctgctaatcctgttaccagtggctgctgccagtggcgataagtcgtgtcttaccgggttggactcaagacgatagttaccggataaggcgcagcggtcgggctgaacggggggttcgtgcacacagcccagcttggagcgaacgacctacaccgaactgagatacctacagcgtgagctatgagaaagcgccacgcttcccgaagggagaaaggcggacaggtatccggtaagcggcagggtcggaacaggagagcgcacgagggagcttccagggggaaacgcctggtatctttatagtcctgtcgggtttcgccacctctgacttgagcgtcgatttttgtgatgctcgtcaggggggcggagcctatggaaaaacgccagcaacgcggcctttttacggttcctggccttttgctggccttttgctcacatggctcgacagatct

SEQ ID NO: 53 - protein, 186 aa, Mus musculus
  dihydrofolate reductase
VRPLNCIVAVSQNMGIGKNGDLPWPPLRNEFKYFQRMTTTSSVEGKQNLVIMGRKTWFSIPEKNRPLKDRINIVLSRELKEPPRGAHFLAKSLDDALRLIEQPELASKVDMVWIVGGSSVYQEAMNQPGHLRLFVTRIMQEFESDTFFPEIDLGKYKLLPEYPGVLSEVQEEKGIKYKFEVYEKKD

SEQ ID NO: 54 - protein, 6 aa, Artificial Sequence
  His tag
HHHHHH

SEQ ID NO: 55 - protein, 8 aa, Artificial Sequence
  Flag tag
DYKDDDDK

SEQ ID NO: 56 - DNA, 1449 bp, Homo sapiens
  PH20 mRNA sequence from 3D35M cells (contains c to a at base 1131)
atgggagtgctaaaattcaagcacatctttttcagaagctttgttaaatcaagtggagtatcccagatagttttcaccttccttctgattccatgttgcttgactctgaatttcagagcacctcctgttattccaaatgtgcctttcctctgggcctggaatgccccaagtgaattttgtcttggaaaatttgatgagccactagatatgagcctcttctctttcataggaagcccccgaataaacgccaccgggcaaggtgttacaatattttatgttgatagacttggctactatccttacatagattcaatcacaggagtaactgtgaatggaggaatcccccagaagatttccttacaagaccatctggacaaagctaagaaagacattacattttatatgccagtagacaatttgggaatggctgttattgactgggaagaatggagacccacttgggcaagaaactggaaacctaaagatgtttacaagaataggtctattgaattggttcagcaacaaaatgtacaacttagtctcacagaggccactgagaaagcaaaacaagaatttgaaaaggcagggaaggatttcctggtagagactataaaattgggaaaattacttcggccaaatcacttgtggggttattatctttttccggattgttacaaccatcactataagaaacccggttacaatggaagttgcttcaatgtagaaataaaaagaaatgatgatctcagctggttgtggaatgaaagcactgctctttacccatccatttatttgaacactcagcagtctcctgtagctgctacactctatgtgcgcaatcgagttcgggaagccatcagagtttccaaaatacctgatgcaaaaagtccacttccggtttttgcatatacccgcatagtttttactgatcaagttttgaaattcctttctcaagatgaacttgtgtatacatttggcgaaactgttgctctgggtgcttctggaattgtaatatggggaaccctcagtataatgcgaagtatgaaatcttgcttgctcctagacaattacatggagactatactgaatccttacataatcaacgtcacactagcagccaaaatgtgtagtcaagtgctttgccaggagcaaggagtgtgtataaggaaaaactggaattcaagtgactatcttcacctcaacccagataattttgctattcaacttgagaaaggtggaaagttcacagtacgtggaaaaccgacacttgaagacctggagcaattttctgaaaaattttattgcagctgttatagcaccttgagttgtaaggagaaagctgatgtaaaagacactgatgctgttgatgtgtgtattgctgatggtgtctgtatagatgcttttctaaaacctcccatggagacagaagaacctcaaattttctactga

SEQ ID NO: 57 - protein, 17 aa, Homo sapiens
  C-terminal peptide cleaved from soluble human PH20, amino acid residues 431-447
DAFKLPPMETEEPQIFY

SEQ ID NO: 58 - protein, 16 aa, Homo sapiens
  C-terminal peptide cleaved from soluble human PH20, amino acid residues 431-446
DAFKLPPMETEEPQIF

SEQ ID NO: 59 - protein, 15 aa, Homo sapiens
  C-terminal peptide cleaved from soluble human PH20, amino acid residues 431-445
DAFKLPPMETEEPQI

SEQ ID NO: 60 - protein, 14 aa, Homo sapiens
  C-terminal peptide cleaved from soluble human PH20, amino acid residues 431-444
DAFKLPPMETEEPQ

SEQ ID NO: 61 - protein, 13 aa, Homo sapiens
  C-terminal peptide cleaved from soluble human PH20, amino acid residues 431-443
DAFKLPPMETEEP

SEQ ID NO: 62 - protein, 12 aa, Homo sapiens
  C-terminal peptide cleaved from soluble human PH20, amino acid residues 431-442
DAFKLPPMETEE

SEQ ID NO: 63 - protein, 520 aa, Ovis aries
  sheep PH20
LDFPAPPLISNTSFLWAWNAPAERCVKIFKLPPDLRLFSVKGSPQKSATGQFITLFYADRLGYYPHIDEKTGNTVYGGIPQLGNLKNHLEKAKKDIAYYIPNDSVGLAVIDWENWRPTWARNWKPKDVYRDESVELVLQKNPQLSFPEASKIAKVDFETAGKSFMQETLKLGKLLRPNHLWGYYLFPDCYNHNYNQPTYNGNCSDLEKRRNDDLDWLWKESTALFPSVYLNIKLKSTPKAAFYVRNRVQEAIRLSKIASVESPLPVFVYHRPVFTDGSSTYLSQGDLVNSVGEIVALGASGIIMWGSLNLSLTMQSCMNLGNYNTTLNPYIINVTLAAKMCSQVLCHDEGVCTRKQWNSSDYLHLNPIMNFAIQTGKGGKYTVPGKVTLEDLQTFSDKFYCSCYANINCKKRVDIKNVHSVNVCMAEDICIEGPVKLQPSDHSSSQNEASTTTVSSISPSTTATTVVSPCTPEKQSPECLKVRCLEAIANVTQTGCQGVKWKNTSSQSQSSIQNIKNQTT

SEQ ID NO: 64 - protein, 474 aa, Bos taurus
  cow hyaluronidase PH20
  SIGNAL (1)...(35): signal sequence
MGMFRRHHISFRSFAGSSGTPQAVFTFLLLPCCLALDFRAPPLISNTSFLWAWNAPVERCVNRRFQLPPDLRLFSVKGSPQKSATGQFITLFYADRLGYYPHIDEKTGKTVFGGIPQLGNLKSHLEKAKNDIAYYIPNDSVGLAVIDWENWRPTWARNWKPKDVYRDESVELVLQKNPQLSFPEASKIAKVDFETAGKSFMQETLKLGKLLRPNHLWGYYLFPDCYNHNHNQPTYNGNCPDVEKRRNDDLEWLWKESTALFPSVYLNIRLKSTQNAALYVRNRVQEAIRLSKIASVESPLPVFVYARPVFTDGSSTYLSQGDLVNSVGEIVSLGASGIIMWGSLNLSLSVQSCMNLGTYLNTTLNPYIINVTLAAKMCSQVLCHDGGVCTRKHWNSSDYLHLNPMNFAIQTGEGGKYTVPGTLTLEDLQKFSDTFYCSCYSNLSCKKRVDIKNVHSVDVCMAEDVCIDAFLKPP

SEQ ID NO: 65 - protein, 517 aa, Ovis aries
  sheep PH20
DFRAPPLISNTSFLWAWNAPAERCIKIFKLPPDLRLFSVKGSPQKSATGQFITLFYADRLGYYPHIDEKTGNTVYGGIPQLGNLKNHLEKAKKDIAYYIPNDSVGLAVIDWENWRPTWARNWKPKDVYRDESVELVLQKNPQLSFPEASKIAKVDFETAGKSFMQETLKLGKLLRPNHLWGYYLFPDCYNHNYNQPTYNGNCSDLEKRRNDDLDWLWKESTALFPSVYLNIKLKSTPKAAFYVRNRVQEAIRLSKIASVESPLPVFVYHRPVFTDGSSTYLSQGDLVNSVGEIVALGASGIIMWGSLNLSLTMQSCMNLGNYLNTTLNPYIINVTLAAKMCSQVLCHDEGVCTRKQWNSSDYLHLNPMNFAIQTGKGGKYTVPGKVTLEDLQTFSDKFYCSCYANINCKKRVDIKNVHSVNVCMAEDICIEGPVKLQPSDHSSSQNEASTTTVSSISPSTTATTVSPCTPEKQSPECLKVRCLEAIANVTQTGCQGVKWKNTSSQSSIQNIKNQTTY

SEQ ID NO: 66 - DNA, 1620 bp, Ovis aries
  DNA encoding sheep PH20
ttttccgtgttggttggctctggacttcagagcaccccctctcatttcaaacacttctttcctctgggcctggaatgccccagctgaacgttgtattaaaatctttaaactacctccagatctgagactcttctctgtaaaaggaagcccccaaaaaagtgctacgggacaatttattacattattttatgctgatagacttggctactatcctcatatagatgaaaaaacaggcaacactgtatatggaggaattccccagttgggaaacttaaaaaatcatttggaaaaagccaaaaaagacattgcctattacataccaaatgacagcgtgggcttggcggtcattgactgggaaaactggaggcctacctgggcaagaaactggaaacctaaagatgtttacagggatgagtctgttgagttggttctgcaaaaaaatccacaactcagtttcccagaggcttccaagattgcaaaagtggattttgagacagcaggaaagagtttcatgcaagagactttaaaactgggaaaattacttcggccaaatcacttatggggttattatctttttcctgattgttacaatcataattataaccagcctacttacaatggaaattgctctgatttagaaaaaaggagaaatgatgatctcgactggttgtggaaggaaagcactgcccttttcccttctgtttatttgaatatcaagttaaaatctactccaaaagctgccttctatgttcgtaatcgtgtccaggaagccattcggttgtctaaaatagcgagtgttgaaagtccacttcccgtttttgtatatcaccgtccagtttttactgatgggtcttcaacatacctttctcagggtgaccttgtgaattcggttggtgagatcgttgctctaggtgcctctgggattataatgtggggcagtctcaatctaagcctaactatgcaatcttgcatgaacctaggcaattacttgaacactacactgaatccttacataatcaacgtcaccctagcagccaaaatgtgcagccaagtgctttgccacgatgaaggagtgtgtacaaggaaacaatggaattcaagcgactatcttcacctgaacccaatgaattttgctattcaaactgggaaaggtggaaaatacacagtacctgggaaagtcacacttgaagacctgcaaacgttttctgataaattttattgcagttgttatgccaacatcaactgtaagaagagagttgatataaaaaatgttcatagtgttaatgtatgtatggcagaagacatttgtatagagggccctgtgaagttacaacccagtgatcattcctctagccagaatgaggcatctactaccaccgtcagcagtatctcaccctctactacagccaccacagtatctccatgtactcctgagaaacagtcccctgagtgcctcaaagtcaggtgtttggaagccatcgccaacgtcacccaaacggggtgtcaaggtgttaaatggaagaacacttccagtcagtcaagtattcaaaatattaaaaatcaaacaacctattaaaatataaattcagtgcttataaaaaaaaaaaaaaaaaaaaaaaa

SEQ ID NO: 67 - protein, 793 aa, Arthrobacter sp.
  Arthrobacter sp. FB24 hyaluronate lyase
MTREFSRRTALKGAALSGLLLAMVHGPAHAAATANATLTPADFAGLRQRWVDQITGRKVLVAGDNDFVTALAALDKKARTAIDLLERSAGRLTVFSDLSLAKDTDLVTTHTRLATMATAWATPGSEHFADAGLLAAIRAGLADANSLCYNASKEEQGNWWSWEIGTPKALADTMVLLHAELTAAERAAYCAAIDHFVPDPWQQFPPKRGKITSVGANRVDLCQAVTIRSLVDEDAEKLTHAVAGLSEVWQYVSAGNGFFTDGSFIQHSTTPYTGSYGVVLLTGLSKLFALLGGTGAEVSDPSRDILFKTVEGSFAPFMVAGAMADSVRGRSISRESNTGFDLGASTIESILLLARAVDPVTARRWRSLCLAWINQNRKAPILADAGVGRTALVKELLAMGLTETDLPGGHYLFPAMDRTMHHSQGWTLSTAMASSRIAWYECGNGENNRGYHTGSGMTYVYDGDLGQYDDAFWATANHCRLPGITVDTSSLPDKVEGEWGAATPANEWTGSTAYGDVAAVGQHLIGPGGTGLTARKSWFVSKDVIVCLGADIRTGSGSRIETVVDHRNLHAGFNAMGTAAGTVAATPGHPEVLTVDRWVHLEGFGGYVVLDAAPLQVLREQREGSWSEVNVKGSAARQTRNYATLYFDHGHEPEAASYAYLVAPGASASMTSSLSGQSFHTVLRNDEVAQAVKFKKEKTTAATFWRPGTVGDLALSGPACVVVKEVGDRLSIAVSDPTQNASTLTLRLKTKRFFRIIEGQGASLSHGADGFTVLEVDIANHAGRTKQIELSAE

SEQ ID NO: 68 - protein, 557 aa, Bdellovibrio bacteriovorus
  Bdellovibrio bacteriovorus HD100 hypothetical hyaluronan lyase
  SIGNAL (1)...(6): signal sequence
MTKFFFLLTLISATAFAQSEPDWTAGVPVPPGGRSNIYSWNDFDFQATLNKGKIHAQVYPVTVTGMLPPYEPVRRLIEEKNSNPLRKWIQSLMKGLSGFRSFEDVLKNLGLHKYPLENERGVYAVPYPNEIRPDTLMGFGLIERNGAEGFTFSCAACHSSNLFGKTVLGMTNRFPRANEFFIKAKKVMPLMDPHIFQAYTRATDAETALLVESKERLKSVALKQPIALGLDTSLAQVSLSLNRRAKDGYANYSDKAARSPRADAYLDNKPADSKPAVWWNVKYKNRWLSDGSVLSGNPIFTNLIWNEIGRGADLHELEQWLADNDHIIKELTTAVFASEAPHITDFYPAEKIDLGRAKAGEQIFKNTCAKCHGHYEKAWNLPQALVLSAAERLKTVEVRYKEKTPVVNVGTDPFRRQGMKSLEQLNDLEISKKNGIVIKAQEGYVPPPLVGIWARWPYMHNNSIPNLCVLLTPAKKRPSIYYSGEALNKDTDYDFSCGGYPIGDKTPKAWKTREHLYDTRNPGMGNMGHDEGIFIKDGKEILSAEDKYNLIQFLQTL

SEQ ID NO: 69 - protein, 813 aa, Propionibacterium acnes
  Propionibacterium acnes KPA171202 hyaluronate lyase
MFGTPSRRTFLTASALSAMALAASPTVTDAIAAPGPDSWSALCERWIDIITGRRAARTSDPRARAIIAKTDRKVAEILTDLVSGSSRQTVLISADLRKEQSPFITKTARAIESMACAWATPGSSYHKDPEILSACIEGLRDFCRLRYNPSQDEYGNWWDWEDGASRAVADVMCILHDVLPPEVMSAAAAGIDHFIPDPWFQQPASVKPTANPVQPVVSTGANRMDLTRAVMCRSIATGDEKRLRHAVDGLPDAWRVTTEGDGFRADGGFIQHSHIPYTGGYGDVLFSGLAMLFPLVSGMRFDIVESARKAFHDQVERGFIPVMYNGQILDDVRGRSISRINESAAMHGISIARAMLMMADALPTHRAEQWRGIVHGWMARNTFDHLSEPSTLVDISLFDAAAKARPVPESSTPSYFASMDRLVHRTADWLITVSNCSDRIAWYEYGNGENEWASRTSQGMRYLLLPGDMGQYEDGYWATVDYSAPTGTTVDSTPLKRAVGASWAAKTPTNEWSGGLASGSWSAAASHITSQDSALKARRLWVGLKDAMVELTTDVTTDASRAITVVEHRKVASSSTKLLVDGNRVSSATSFQNPRWAHLDGVGGYVFATDTDLSADVATRKGTWIDVNPSRKVKGADEVIERAYASLHVTHHDRPVAWALLPTASRSHTMALATRPGVEPFTVLRNDATVQAVRSAGALLTKDPTVVTTLAFWKPATCGGVAVNRPALVQTRESANQMEVVIVEPTQKRGSLTVTIEGSWKVKTADSHVDVSCENAAGTLHVDTAGLGGQSVRVTLARQVTQTPSGGGRHDRA

SEQ ID NO: 70 - protein, 1072 aa, Streptococcus agalactiae
  Streptococcus agalactiae hyaluronate lyase
  SIGNAL (1)...(30): signal sequence
MEIKKKYRIMLYSALILGTILVNNSYQAKAEELTKTTSTSQIRDTQTNNIEVLQTESTTVKETSTTTTQQDLSNPTASTATATATHSTMKQVVDNQTQNKELVKNGDFNQTNPVSGSWSHTSAREWSAWIDKENTADKSPIIQRTEQGQVSLSSDKGFRGAVTQKVNIDPTKKYEVKFDIETSNKAGQAFLRIMEKKDNNTRLWLSEMTSGTTNKHTLTKIYNPKLNVSEVTLELYYEKGTGSATFDNISMKAKGPKDSEHPQPVTTQIEESVNTALNKNYVFNKADYQYTLTNPSLGKIVGGILYPNATGSTTVKISDKSGKIIKEVPLSVTASTEDKFTKLLDKWNDVTIGNHVYDTNDSNMQKINQKLDETNAKNIKTIKLDSNHTFLWKDLDNLNNSAQLTATYRRLEDLAKQITNPHSTIYKNEKAIRTVKESLAWLHQNFYNVNKDIEGSANWWDFEIGVPRSITATLALMNNYFTDAEIKTYTDPIEHFVPDAGYFRKTLDNPFKALGGNLVDMGRVKIIEGLLRKDNTIIEKTSHSLKNLFTTATKAEGFYADGSYIDHTNVAYTGAYGNVLIDGLTQLLPIIQETDYKISNQELDMVYKWINQSFLPLIVKGELMDMSRGRSISREAASSHAAAVEVLRGFLRLANMSNEERNLDLKSTIKTIITSNKFYNVFNNLKSYSDIANMNKMLNDSTVATKPLKSNLSTFNSMDRLAYYNAEKDFGFALSLHSKRTLNYEGMNDENTRGWYTGDGMFYLYNSDQSHYSNHFWPTVNPYKMAGTTEKDAKREDTTKEFMSKHSKDAKEKTGQVTGTSDFVGSVKLNDHFALAAMDFTNWDRTLTAQKGWVILNDKIVFLGSNIKNTNGIGNVSTTIDQRKDDSKTPYTTYVNGKTIDLKQASSQQFTDTKSVFLESKEPGRNIGYIFFKNSTIDIERKEQTGTWNSINRTSKNTSIVSNPFITISQKHDNKGDSYGYMMVPNIDRTSFDKLANSKEVELLENSSKQQVIYDKNSQTWAVIKHDNQESLINNQFKMNKAGLYLVQKVGNDYQNVYYQPQTMTKTDQLAI

SEQ ID NO: 71 - protein, 1072 aa, Streptococcus agalactiae
  Streptococcus agalactiae 18RS21 hyaluronate lyase
  SIGNAL (1)...(30): signal sequence
MEIKKKHRIMLYSALILGTILVNNSYQAKAEELTKTTSTSQIRDTQTNNIEVLQTESTTVKETSTTTTQQDLSNPTASTATATATHSTMKQVVDNQTQNKELVKNGDFNQTNPVSGSWSHTSAREWSAWIDKENTADKSPIIQRTEQGQVSLSSDKGFRGAVTQKVNIDPTKKYEVKFDIETSNKAGQAFLRIMEKKDNNTRLWLSEMTSGTTNKHTLTKIYNPKLNVSEVTLELYYEKGTGSATFDNISMKAKGPKDSEHPQPVTTQIEESVNTALNKNYVFNKADYQYTLTNPSLGKIVGGILYPNATGSTTVKISDKSGKIIKEVPLSVTASTEDKFTKLLDKWNDVTIGNHVYDTNDSNMQKINQKLDETNAKNIKTIKLDSNHTFLWKDLDNLNNSAQLTATYRRLEDLAKQITNPHSTIYKNEKAIRTVKESLAWLHQNFYNVNKDIEGSANWWDFEIGVPRSITATLALMNNYFTDAEIKTYTDPIEHFVPDAGYFRKTLDNPFKALGGNLVDMGRVKIIEGLLRKDNTIIEKTSHSLKNLFTTATKAEGFYADGSYIDHTNVAYTGAYGNVLIDGLTQLLPIIQETDYKISNQELDMVYKWINQSFLPLIVKGELMDMSRGRSISREAASSHAAAVEVLRGFLRLANMSNEERNLDLISTIKTIITSNKFYNVFNNLKSYSDIANMNKMLNDSTVATKPLKSNLSTFNSMDRLAYYNAEKDFGFALSLHSKRTLNYEGMNDENTRGWYTGDGMFYLYNSDQSHYSNHFWPTVNPYKMAGTTEKDAKREDTTKEFMSKHSKDAKEKTGQVTGTSDFVGSVKLNDHFALAAMDFTNWDRTLTAQKGWVILNDKIVFLGSNIKNTNGIGNVSTTIDQRKDDSKTPYTTYVNGKTIDLKQASSQQFTDTKSVFLESKEPGRNIGYIFFKNSTIDIERKEQTGTWNSINRTSKNTSIVSNPFITISQKHDNKGDSYGYMMVPNIDRTSFDKLANSKEVELLENSSKQQVIYDKNSQTWAVIKHDNQESLINNQFKMNKAGLYLVQKVGNDYQNVYYQPQTMTKTDQLAI

SEQ ID NO: 72 - protein, 1081 aa, Streptococcus agalactiae
  Streptococcus agalactiae A909 hyaluronate lyase
  SIGNAL (1)...(30): signal sequence
MEIKKKHRIMLYSALILGTILVNNSYQAKAEEFTKTTSTSQIRDTQTNNVEVPQTESTTVKGTSTTTTQQDLSNSTASTATATATHSTMKQVVDNQTQNKELVKNGDFKEKIIDKKIDKKSQWTNLYGAKDWNTYIDQTKSVNKSPIIQRTEQGQVSLSSDKGFRGAVTQKVNIDPTKKYEVKFDIETSNKVGQAFLRIMKKKDKNTRLWLSEMTSGTTNKHTLTKIYNPKLNVSEVTLELYYEKGTGSVTFDNISMKAKGPKDSEHPQPVTTQIEESVNTALNKNYVFNKADYQYTLTNPSLGKIVGGILYPSATGSTTVKISDKSGKIIKEVPLSVTASTEDNFTKLLDKWNDVTIGNHVYDTNDSNMQKLNQKLDETNAKNIKDIKLDSNRTFLWEDLKGLNNSAQLTATYRRLEDLAKQITNPHSTIYKNEKAIRTVKESLAWLHQNFYNVNKDIEGSANWWDFEIGVPRSITATLALMNNYFTDAEIKTYTDPIEHFVPDAGYFRKTLVNPFKALGGNLVDMGRVKIIEGLLRKDNTIIKKTSHSLKNLFTTATKAEGFYADGSYIDHTNVAYTGAYGNVLIDGLTQLLPIIQETDYKISNQELDMVYKWINQSFLPLIVKGELMDMSRGRSISREAASSHAAAVEVLRGFLRLANMSNEERNLDLKSTIKTIITSNKFYNVFNNLKSYSDIANMNKLLNDSTVATKPLKSNLSTFNSMDRLAYYNAEKDFGFALSLHSKRTLNYEGMNDENTRGWYTGDGMFYLYNSDQSHYSNHFWPTVNPYKMAGTTEKDTGREDTIKKLMNRYDKTNKNSKVMTGQVTGTSDFVGSVKLNDHFALAAMDFTNWDRTLTAQKGWVILNDKIVFLGSNIKNTNGVGNVSTTIDQRKDDSKTPYTTYVNGKTVDLKQASSQQFTDTKSVFLESKEPGRNIGYIFFKNSTIDIERKEQTGTWNSINRTSKNTSIVSNPFITISQKHDNKGDSYGYMMVPNIDRTSFDKLANSKEVELLENSSKQQVIYDKNSQTWAVIKHDNQESLINNQFKMNKAGLYLVQKVGNDYQNVYYQPQTMTKTDQLAI

SEQ ID NO: 73 - protein, 984 aa, Streptococcus agalactiae
  Streptococcus agalactiae NEM316 hyaluronate lyase
MKQVVDNQTQNKELVKNGDFNQTNPVSGSWSHTSAREWSAWIDKENTADKSPIIQRTEQGQVSLSSDKGFRGAVTQKVNIDPTKKYEVKFDIETSNKAGQAFLRIMEKKDNNTRLWLSEMTSGTTNKHTLTKIYNPKLNVSEVTLELYYEKGTGSATFDNISMKAKGPKDSEHPQPVTTQIEESVNTALNKNYVFNKADYQYTLTNPSLGKIVGGILYPNATGSTTVKISDKSGKIIKEVPLSVTASTEDKFTKLLDKWNDVTIGNHVYDTNDSNMQKINQKLDETNAKNIKTIKLDSNHTFLWKDLDNLNNSAQLTATYRRLEDLAKQITNPHSTIYKNEKAIRTVKESLAWLHQNFYNVNKDIEGSANWWDFEIGVPRSITATLALMNNYFTDAEIKTYTDPIEHFVPDAGYFRKTLDNPFKALGGNLVDMGRVKIIEGLLRKDNTIIEKTSHSLKNLFTTATKAEGFYADGSYIDHTNVAYTGAYGNVLIDGLTQLLPIIQETDYKISNQELDMVYKWINQSFLPLIVKGELMDMSRGRSISREAASSHAAAVEVLRGFLRLANMSNEERNLDLKSTIKTIITSNKFYNVFNNLKSYSDIANMNKMLNDSTVATKPLKSNLSTFNSMDRLAYYNAEKDFGFALSLHSKRTLNYEGMNDENTRDWYTGDGMFYLYNSDQSHYSNHFWPTVNPYKMAGTTEKDAKREDTTKEFMSKHSKDAKEKTGQVTGTSDFVGSVKLNDHFALAAMDFTNWDRTLTAQKGWVILNDKIVFLGSNIKNTNGIGNVSTTIDQRKDDSKTPYTTYVNGKTIDLKQASSQQFTDTKSVFLESKEPGRNIGYIFFKNSTIDIERKEQTGTWNSINRTSKNTSIVSNPFITISQKHDNKGDSYGYMMVPNIDRTSFDKLANSKEVELLENSSKQQVIYDKNSQTWAVIKHDNQESLINNQFKMNKAGLYLVQKVGNDYQNVYYQPQTMTKTDQLAI

SEQ ID NO: 74 - protein, 807 aa, Staphylococcus aureus; identical to SEQ ID NO: 33
  Staphylococcus aureus subsp. aureus COL hyaluronate lyase

SEQ ID NO: 75 - protein, 420 aa, Staphylococcus aureus
  Staphylococcus aureus strain MRSA252 hyaluronate lyase 2
MTYRMKKWQKLSTITLLMAGVITLNGGEFRSIDKHQIAVADTNVQTTDYEKLRNIWLDVNYGYDKYDENNPDMKKKFEATENEAEKLLKEMKTESDRKYLWESSKDLDTKSADMTRTYRNIEKISEAMKHKNTKLKTDENKTKVKDALEWLHKNAYGKEPDKKVADLTSNFKNKTSRNTNLNWWDYEIGTPRALTNTLILLQEDFTDEEKKKYTAPIKTFAPDSDKILSSVGKSEPAKGGNLVDISKVKLLESIIEEDKDMMKKSIDSFNTVFTYAQNSATGKERNGFYKDGSYIDHQDVPYTGAYGVVLLEGISQMMPMIKETPFNDSNQNDTTLKSWIDDGFMPLIYKGEMMDLSRGRAISRENETSHSASATVMKSLLRLSDTMDKSTKAKYKKIVKTSVESDSSYKQTDYLSSYSD

SEQ ID NO: 76 - protein, 806 aa, Staphylococcus aureus
  Staphylococcus aureus strain MRSA252 hyaluronate lyase 1
MTNKMKKWQKLSTITLLMTGVIALNNGEFRNVDKHQIAVADTNVQTPDYEKLKKTWLDVNYGYDQYDENNQDMKKKFDAKEKEAKKLLDDMKTDTNRTYLWSGAENLETNSSHMTKTYRNIEKIAESMQHKNTVLKTVENKLKIKEALDWMHKNVYGKNPSQKVEDLTKNRKGQTTPKNNSLNWWDYEIGTPRALTNTLLLMDDMLTKDEMKNYSKPISTYAPSSDKILSSVGESEDAKGGNLVDISKVKLLESVIEEDVDMLKKSIDSFNKVFTYVQDSATGKGRNGFYKDGSYIDHQDVPYTGAYGVVLLEGISQMMPMIKESPFKTTQDNATLSNWIDEGFMPLIYKGEMMDLSRGRAISRENETSHTASATVMKSLLRLNDTMDDSTKTRYKQIVKTSVNSDSSYNQNNYLNSYSDIAKMKKLMNDSTISKNDLTQQLKIYNDMDRVTYHNKDLDFAFGLSMTSKNIARYENINGENLKGWHTGAGMSYLYNSDVKHYRDNFWATADMTCLPGTTTLNDMPSTNTKNDKSFVGGTKLNNKYASIGMDFENQDKTLTAKKSYFILNDKIVFLGTGIKSTDSSKNPVTSVENRKANGYKLFKDDIEITTSDVNAQETHSVFLESNDTKKNIGYHFLDKPKITVKKESHTGKWSEINKSQKKDDKKDEYYEVTQTHNTSDSKYAYVLYPGLSKSDFKSKNNNVSIVKQDEDFHVIKDNDGVFAGVNYSDNTKSFDINGITVELKEKGMFVIKKKDDKAYKCSFYNPETTNTASNIESKIFIKGYTITNKSVINSNDAGVNFELTK

SEQ ID NO: 77 - protein, 815 aa, Staphylococcus aureus
  Staphylococcus aureus subsp. aureus MW2 hyaluronate lyase precursor
MTYRIKKWQKLSTITLLMAGVITLNGGEFRSIDKYQIAVADTNVQTPDYEKLRNTWLDVNYGYDKYDEKNDAMKKKFEATENEAKKLLSEMKTESDRKYLWENSKDLDTKSADMTRTYRNIEKIAEAMKHKDTKLKIDENKKKVKDALEWLHKNAYGKEPDKKVADLTSNFKNKTSRNTNLNWWDYEIGTPRALTNTLILLNDQFSNDEKKKYTAPIKTFAPESDKILSSVGQPEQAKGGNLVDIAKVKLLESIIEEDKDITKNSIDAFNKVFTYVQSNATGKERNGFYKDGSYIDHQDVPYTGAYGVVLLEGISQMMPMIKETPFNDKTQNDTTLKSWIDDGFMPLIYKGEMMDLSRGRAISRENETSHTASATVMKSLLRLSDAMDDSTKAKYKQIVKTSVKSDSSYGQNDTLSSYSDISKMKSLMEDSTISTNGLTQQLKIYNDMDRVTYHNKDLDFAFGLSMTSKNVARYESINGENLKGWHTGAGMSYLYNSDVKHYRDNFWATADMKRLAGTTTLENEEPKGTDVKKSSKTFVGGTKFDDQHASIGMDFENQDKTLTAKKSYFILNDKIVFLGTGIKSTDSSKNPVTTIENRKANGYTLYTDDKQTTASDNQGTNSVFLESTNKPKNNIGYHFLNESKITVKKESHTGKWSDINKSQKQDSKTNQYYEVTQKHSNTDSKYAYVLYPGLSKDDFNTKKDKVTVVKQDDDFHVVKDNESVWAGVNYSDSTQTFIINNTKVEVKAKGMFILKKKDDKTYECSFYNPESTNTASDIESKISMTGYSITNKNTSTSNESGVRFELQQTLNKDDN

SEQ ID NO: 78 - protein, 807 aa, Staphylococcus aureus; identical to SEQ ID NO: 33
  Staphylococcus aureus subsp. aureus COL hyaluronate lyase

SEQ ID NO: 79 - protein, 809 aa, Staphylococcus aureus
  Staphylococcus aureus RF122 hyaluronate lyase
MTYRMKKWQKLSTITLLMAGGITFNDSEFRSVDKHQIAVADTNVQTPNYEKLKNTWLDVNYGYDKYDESNPDMKKKFEATEKEARKLLSEMKTESDRKYLWENSKDLDTKSADMTRTYRNIEKIAEAMKHPKTTLKNDENKKKVKDALEWLHKNAYGKEPGKKVADLKTNFSKSAPQKNTNLNWWDYEIGTPRALTNTLILLKEDFTDEEKKKYTAPIKTFAPKSDEILSSVGKAEPAKGGNLVDISKVKLLESIIEEDKDMMKNSIDSFNKVFTYVQDSATDKERNGFYKDGSYIDHKDVPYTGAYGVVLLEGISQMMPMIKETPFNDKTQNNTTLTSWIDDGFMPLIYKGEMMDLSRGRAISRENETSHSASATVMKSLLRLSDAMDESTKAKYKQIVKNSVKSDSSYGQNDTLSSYSDIDKMKSLMTDSTISTNGLTQQLKIYNAMDRVTYHNKDLDFAFGLSMTSKNVARYENINGENLKGWHTGAGMSYLYNSDVRHYRDNFWATADMKRLADTTTLENEEPKGTDVKKSSKTFVGGTKFDDQHASIGMDFENQDKTLTAKKSYFILNDKIVFLGTGIKTTDSSKNPVTTIENRKAHGYTLYTDDKQTTNSNNQETNSVFLESTNSTQNNIGYHFLNKSKITVKKESHTGKWSDINKSQKDTQKTDEYYEVTQKHSNTDDKYAYVLYPGITKDNFKSKASQVTVVKQDDDFHVVKDNESVWAGVNYSDSTQTFDINGTKVEVKAKGMFILKKKDDNTYECSFYNPESTNSASDIESKISMTGYSITNKNTSNTNESGVRFELTK

SEQ ID NO: 80 - protein, 807 aa, Staphylococcus aureus
  Staphylococcus aureus RF122 hyaluronate lyase precursor
MTYKMKKWQKLSTITLLMAGVITLNNGEFRNVDKHQIAVADTNVQTPDYEKLKKTWLDVNYGNDQYDENNQDMKKKFDAKENEAKKLLEDMKTDTNRTYLWSGAENLETNSSHMTKTYRNIEKIAEAMRHKNTSLKTDENKLKIKDAIKWLHHNVYGKDPDKKVADLTTNRKEKDSSKKNNSLNWWDYEIGTPRALTNTLLLMDNMLTKDEMKNYSKPISIYSPSSYKILSSVGESEDAKGGNLVDIAKVKFLESVIEEDVDMMKKSIDSFNKVFTYVQDSATGKARNGFYKDGSYIDHQDVPYTGAYGVVLLEGISQMMPMIKESPFKHTQDKATLSNWIDEGFMPLIYKGEMMDLSRGRAISRENETSHTASATVMKSLLRLSDTMDESTKTKYKQIVKTSVKSDSSYDSNDTLNSYSDIDKMKKLMNDSTISKNDLTQQLKIYNDMDRVTYHNKELDFAFGLSMTSKNIARYENINGENLKGWHTGAGMSYLYNSDVKHYRDNFWATADMTRLPGTTTLNDMPSTNTKNDKSFVGGTKLNNKYASIGMDFENQDKTLTAKKSYFILNDKIVFIGTGIKSTDSSKNPVTSVENRKANGYKLFKGDIEITTSDVNAQETHSVFLESNDTKKNIGYHFLDKPKITVKKESHTGKWSEINKSQKTDDKKDEYYEVTQTHNTSDSKYAYVLYPGLSKSDFKSKNNNVSIVKQDEDFHVIKDNDGVFAGVNYSDSTKSFDINGTIVELKEKGMFVIKKKDDNTYECSFYNPTSTNSTSNKESKISVTGYTITNQSVSNFKESDIHFELTK

SEQ ID NO: 81 - protein, 807 aa, Staphylococcus aureus; identical to SEQ ID NO: 33
  Staphylococcus aureus subsp. aureus USA300_TCH1516 hyaluronate lyase

SEQ ID NO: 82 - protein, 1066 aa, Streptococcus pneumoniae
  Streptococcus pneumoniae hyaluronidase
  SIGNAL (1)...(30): signal sequence
MQTKTKKLIVSLSSLVLSGFLLNHYMTIGAEETTTNTIQQSQKEVQYQQRDTKNLVENGDFGQTEDGSSPWTGSKAQGWSAWVDQKNSADASTRVIEAKDGAITISSHEKLRAALHRMVPIEAKKKYKLRFKIKTDNKIGIAKVRIIEESGKDKRLWNSATTSGTKDWQTIEADYSPTLDVDKIKLELFYETGTGTVSFKDIELVEVADQLSEDSQTDKQLEEKIDLPIGKKHVFSLADYTYKVENPDVASVKNGILEPLKEGTTNVIVSKDGKEVKKIPLKILASVKDAYTDRLDDWNGIIAGNQYYDSKNEQMAKLNQELEGKVADSLSSISSQADRTYLWEKFSNYKTSANLTATYRKLEEMAKQVTNPSSRYYQDETVVRTVRDSMEWMHKHVYNSEKSIVGNWWDYEIGTPRAINNTLSLMKEYFSDEEIKKYTDVIEKFVPDPEHFRKTTDNPFKALGGNLVDMGRVKVIAGLLRKDDQEISSTIRSIEQVFKLVDQGEGFYQDGSYIDHTNVAYTGAYGNVLIDGLSQLLPVIQKTKNPIDKDKMQTMYHWIDKSFAPLLVNGELMDMSRGRSISRANSEGHVAAVEVLRGIHRIADMSEGETKQCLQSLVKTIVQSDSYYDVFKNLKTYKDISLMQSLLSDAGVASVPRPSYLSAFNKMDKTAMYNAEKGFGFGLSLFSSRTLNYEHMNKENKRGWYTSDGMFYLYNGDLSHYSDGYWPTVNPYKMPGTTETDAKRADSDTGKVLPSAFVGTSKLDDANATATMDFTNWNQTLTAHKSWFMLKDKIAFLGSNIQNTSTDTAATTIDQRKLESGNPYKVYVNDKEASLTEQEKDYPETQSVFLESFDSKKNIGYFFFKKSSISMSKALQKGAWKDINEGQSDKEVENEFLTISQAHKQNRDSYGYMLIPNVDRATFNQMIKELESSLIENNETLQSVYDAKQGVWGIVKYDDSVSTISNQFQVLKRGVYTIRKEGDEYKIAYYNPETQESAPDQEVFKKLEQAAQPQVQNSKEKEKSEEEKNHSDQKNLPQTGEGQSILASLGFLLLGAFYLFRRGKNN

SEQ ID NO: 83 - protein, 1078 aa, Streptococcus pneumoniae
  Streptococcus pneumoniae strain ATCC BAA-255 / R6 hyaluronate lyase
  SIGNAL (1)...(41): signal sequence
MILQYVYWSVYMQTKTKKLIVSLSSLVLSGFLLNHYMTVGAEETTTNTIQQSQKEVQYQQRDTKNLVENGDFGQTEDGSSPWTGSKAQGWSAWVDQKNSSADASTRVIEAKDGAITISSPEKLRAAVHRMVPIEAKKKYKLRFKIKTDNKVGIAKVRIIEESGKDKRLWNSATTSGTKDWQTIEADYSPTLDVDKIKLELFYETGTGTVSFKDIELVEVADQPSEDSQTDKQLEEKIDLPIGKKHVFSLADYTYKVENPDVASVKNGILEPLKEGTTNVIVSKDGKEVKKIPLKILASVKDTYTDRLDDWNGIIAGNQYYDSKNEQMAKLNQELEGKVADSLSSISSQADRIYLWEKFSNYKTSANLTATYRKLEEMAKQVTNPSSRYYQDETVVRTVRDSMEWMHKHVYNSEKSIVGNWWDYEIGTPRAINNTLSLMKEYFSDEEIKKYTDVIEKFVPDPEHFRKTTDNPFKALGGNLVDMGRVKVIAGLLRKDDQEISSTIRSIEQVFKLVDQGEGFYQDGSYIDHTNVAYTGAYGNVLIDGLSQLLPVIQKTKNPIDKDKMQTMYHWIDKSFAPLLVNGELMDMSRGRSISRANSEGHVAAVEVLRGIHRIADMSEGETKQRLQSLVKTIVQSDSYYDVFKNLKTYKDISLMQSLLSDAGVASVPRTSYLSAFNKMDKTAMYNAEKGFGFGLSLFSSRTLNYEHMNKENKRGWYTSDGMFYLYNGDLSHYSDGYWPTVNPYKMPGTTETDAKRADSDTGKVLPSAFVGTSKLDDANATATMDFTNWNQTLTAHKSWFMLKDKIAFLGSNIQNTSTDTAATTIDQRKLESSNPYKVYVNDKEASLTEQEKDYPETQSVFLESSDSKKNIGYFFFKKSSISMSKALQKGAWKDINEGQSDKEVENEFLTISQAHKQNGDSYGYMLIPNVDRATFNQMIKELESSLIENNETLQSVYDAKQGVWGIVKYDDSVSTISNQFQVLKRGVYTIRKEGDEYKIAYYNPETQESAPDQEVFKKLEQAAQPQVQNSKEKEKSEEEKNHSDQKNLPQTGEGQSILASLGFLLLGAFYLFRRGKNN

SEQ ID NO: 84 - protein, 1067 aa, Streptococcus pneumoniae
  Streptococcus pneumoniae serotype 2, strain D39 / NCTC 7466 hyaluronate lyase
  SIGNAL (1)...(30): signal sequence
MQTKTKKLIVSLSSLVLSGFLLNHYMTVGAEETTTNTIQQSQKEVQYQQRDTKNLVENGDFGQTEDGSSPWTGSKAQGWSAWVDQKNSSADASTRVIEAKDGAITISSPEKLRAAVHRMVPIEAKKKYKLRFKIKTDNKVGIAKVRIIEESGKDKRLWNSATTSGTKDWQTIEADYSPTLDVDKIKLELFYETGTGTVSFKDIELVEVADQPSEDSQTDKQLEEKIDLPIGKKHVFSLADYTYKVENPDVASVKNGILEPLKEGTTNVIVSKDGKEVKKIPLKILASVKDTYTDRLDDWNGIIAGNQYYDSKNEQMAKLNQELEGKVADSLSSISSQADRIYLWEKFSNYKTSANLTATYRKLEEMAKQVTNPSSRYYQDETVVRTVRDSMEWMHKHVYNSEKSIVGNWWDYEIGTPRAINNTLSLMKEYFSDEEIKKYTDVIEKFVPDPEHFRKTTDNPFKALGGNLVDMGRVKVIAGLLRKDDQEISSTIRSIEQVFKLVDQGEGFYQDGSYIDHTNVAYTGAYGNVLIDGLSQLLPVIQKTKNPIDKDKMQTMYHWIDKSFAPLLVNGELMDMSRGRSISRANSEGHVAAVEVLRGIHRIADMSEGETKQRLQSLVKTIVQSDSYYDVFKNLKTYKDISLMQSLLSDAGVASVPRTSYLSAFNKMDKTAMYNAEKGFGFGLSLFSSRTLNYEHMNKENKRGWYTSDGMFYLYNGDLSHYSDGYWPTVNPYKMPGTTETDAKRADSDTGKVLPSAFVGTSKLDDANATATMDFTNWNQTLTAHKSWFMLKDKIAFLGSNIQNTSTDTAATTIDQRKLESSNPYKVYVNDKEASLTEQEKDYPETQSVFLESSDSKKNIGYFFFKKSSISMSKALQKGAWKDINEGQSDKEVENEFLTISQAHKQNGDSYGYMLIPNVDRATFNQMIKELESSLIENNETLQSVYDAKQGVWGIVKYDDSVSTISNQFQVLKRGVYTIRKEGDEYKIAYYNPETQESAPDQEVFKKLEQAAQPQVQNSKEKEKSEEEKNHSDQKNLPQTGEGQSILASLGFLLLGAFYLFRRGKNN

SEQ ID NO: 85 - protein, 805 aa, Streptococcus pyogenes
  Streptococcus pyogenes M1 GAS extracellular hyaluronate lyase
  SIGNAL (1)...(33)
MNTYFCTHHKQLLLYSNLFLSFAMMGQGTAIYADTLTSNSEPNNTYFQTQTLTTTDSEKKVVQPQQKDYYTELLDQWNSIIAGNDAYDKTNPDMVTFHNKAEKDAQNIIKSYQGPDHENRTYLWEHAKDYSASANITKTYRNIEKIAKQITNPESCYYQDSKAIAIVKDGMAFMYEHAYNLDRENHQTTGKENKENWWVYEIGTPRAINNTLSLMYPYFTQEEILKYTAPIEKFVPDPTRFRVRAANFSPFEANSGNLIDMGRVKLISGILRKDDLEISDTIKAIEKVFTLVDEGNGFYQDGSLIDHVVTNAQSPLYKKGIAYTGAYGNVLIDGLSQLIPIIQKTKSPIKADKMATIYHWINHSFFPIIVRGEMMDMTRGRSISRFNAQSHVAGIEALRAILRIADMSEEPHRLALKTRIKTLVTQGNAFYNVYDNLKTYHDIKLMKELLSDTSVPVQKLDSYVASFNSMDKLALYNNKHDFAFGLSMFSNRTQNYEAMNNENLHGWFTSDGMFYLYNNDLGHYSENYWATVNPYRLPGTTETEQKPLEGTPENIKTNYQQVGMTGLSDDAFVASKKLNNTSALAAMTFTNWNKSLTLNKGWFILGNKIIFVGSNIKNQSSHKAYTTIEQRKENQKYPYCSYVNNQPVDLNNQLVDFTNTKSIFLESDDPAQNIGYYFFKPTTLSISKALQTGKWQNIKADDKSPEAIKEVSNTFITIMQNHTQDGDRYAYMMLPNMTRQEFETYISKLDIDLLENNDKLAAVYDHDSQQMHVIHYGKKATMFSNHNLSHQGFYSFPHPVRQNQQ

SEQ ID NO: 86 - protein, 780 aa, Streptococcus pyogenes
  Streptococcus pyogenes serotype M2, strain MGAS10270 hyaluronate lyase precursor
MVYFYLVNQSTFIISFLYWRNVSVNTYFCTHHKQLLLYSNLFLSFAMIGQGTAIYADTLTSNSEPNNTYFQTQTLTTTDSEKKVVQPQQKDYYTELLDQWNSIIAGNDAYDKTNPDMVTFHNKAEKDAQNIIKSYQGPDHENRTYLWEHAKDYSASTNITKTYRNIEKIAKQITNPESCYYQDSKAIAIVKDGMAFMYEHAYNLNRENHQTTGKENKENWWVYEIGTPRAINNTLSLMYPYFTQEEILKYTAPIEKFVPDPTRFRVRAANFSPFEANSGNLIDMGRVKLISGILRKDDLEISDTIKAIEKVFTLVDEGNGFYQDGSLIDHVVTNTQSPLYKKGIAYTGAYGNVLIDGLSQLIPIIQKTKSPIEADKMATIYHWINHSFFPIIVRGEMMDMTRGRSISRFNAQSHVAGIEALRAILRIADMSEEPHRLELKTRIKTLVTQGNAFYNVYDNLKTYHDIKLMKELLSDTSVPVQKLDSYVASFNSMDKLALYNNKHDFAFGLSMFSNRTQNYEAMNNENLHGWFTSDGMFYLYNNDLGHYSENYWATVNPYRLPGTTETEQKPLEGTPENIKTNYQQVGMTSLSDDAFVASKKLNNTSALAAMTFTNWNKSLTLNKGWFILGNKIIFVGSNIKNQSSHKAYTTIEQRKENQKHPYCSYVNNQPVDLNNQLVDFTNTKSIFLESDDPAQNIGYYFFKPRTLSISKALQTGKWQNIKADDKSPEAIKEVSNTFITIMQNHTQEGDRYAYMMLPNMTRQEFETYISKLDIDLLENN

SEQ ID NO: 87 - protein, 868 aa, Streptococcus pyogenes
  Streptococcus pyogenes serotype M2, strain MGAS10270 hyaluronate lyase precursor
  SIGNAL (1)...(33): signal sequence
MNTYFCTHHKQLLLYSNLFLSFAMMGQGTAIYADTLTSNSKPNNTYFQTQTLTTTDSEKKVVQPQQKDYYTELLDQWNSIIAGNDAYDKTNPDMVTFHNKAEKDAQNIIKSYQEPDHENRTYLWEHAKDYSASANITKTYRNIEKIAKQITNPESCYYQDSKAIAIVKDGMAFMYEHAYNLDRENHQTTGKENKENWWDYEIGTPRAINNTLSLMYPYFTQEEILKYTAPIEKFVPDPTRFRVRAANFPPFEANSGNLIDMGRVKLISGILRKDDLEISDTIKAIEKVFTLVDEGNGFYQDGSLIDHVVTNAQSPLYKKGIAYTGAYGNVLIDGLSQLIPIIQKTKSPIEADKMATIYHWINHSFFPIIVRGEMMDMTRGRSISRFNAQSHVAGIEALRAILRIADMSEEPHRLALKTRIKTLVTQGNVFYNVYDNLKTYHDIKLMKELLSDTSVPVQKLDSYVASFNSMDKLALYNNKHDFAFGLSMFSNRTQNYEAMNNENLHGWFTSDGMFYLYNNDLGHYSENYWATVNPYRLPGTTETEQKPLEGTPENIKTNYQQVGMTSLSDDAFVASKKLNNTSALAAMTFTNWNKSLTLNKGWFILGNKIIFVGSNIKNQSSHKAYTTIEQRKENQKHPYCSYVNNQPVDLNNQLVDFTNTKSIFLESDDPAQNIGYYFFKPTTLSISKALQTGKWQNIKADDKSPEAIKEVSNTFITIMQNHTQDGDRYAYMMLPNMTRQEFETYISKLDIDLLENNDKLAAVYDHDSQQMHVIHYEKKATTFSNHNLSHQGFYSFPHPVKQNQQQKLAHQGIAAKNNALNSHKIPHKRQRRLPRTGYQSSSLEFLGGALVASFNHITKPFRKKDLRI

SEQ ID NO: 88 - protein, 828 aa, Streptococcus pyogenes
  Streptococcus pyogenes serotype M6, strain MGAS10394 hyaluronate lyase precursor
MVYFYLVDQFTFIISFLYWRNLSVNTYFCTHHKQLLLYSNLFLSFAMMGQGTAIYADTLTSNSEPNNTYFQTQTLTTTDSEKKVVQPQQKDYYTELLDQWNSIIAGNDAYDKTNPDMVTFHNKAEKDAQNIIKSYQGPDHENRTYLWEHAKDYSASTNITKTYRNIEKIAKQITNPESCYYQDSKAIAIVKDGMAFMYEHAYNLDRENHQTTGKENKENWWVYEIGTPRAINNTLSLMYPYFTQEEILKYTAPIEKFVPDPTRFRVRAANFSPFEANSGNLIDMGRVKLISGILRKDDLEISDTIKAIEKVFTLVDEGNGFYQDGSLIDHVVTNAQSPLYKKGIAYTGAYGNVLIDGLSQLIPIIQKTKSPIEADKMATIYHWINHSFFPIIVRGEMMDMTRGRSISRFNAQSHVAGIEALRAILRIADMSEEPHRLALKTRIKTLVTQGNAFYNVYDNLKTYHDIKLMKELLSDTFVPVQKLDSYVASFNSMDKLALYNNKHDFAFGLSMFSNRTQNYEAMNNENLHGWFTSDGMFYLYNNDLGHYSENYWATVNPYRLPGTTETEQKPLEGTPENIKTDYQQVGMTSLSDDAFVASKKLNNTSALAAMTFTNWNKSLTLNKGWFILGNKIIFVGSNIKNQSSHKAYTTIEQRKENQKHPYCSYVNNQPVDLNNQLVDFTNTKSIFLESDDPAQNIGYYFFKPTTLSISKALQTGKWQNIKADDKSPEAIKEVSNTFITIMQNHTQDGDRYAYMMLPNMTRQEFETYISKLDIDLLENNDKLAAVYDHDSQQMHVIHYEKKATMFSNHNLSHQGFYSFPHPVKQNQQ

SEQ ID NO: 89 - protein, 556 aa, Streptococcus pyogenes
  Streptococcus pyogenes strain MGAS9429 hyaluronate lyase 2
MVYFYLVNQSTFIISFLYWRNLSVNTYFCTHHKQLLLYSNLFLSFAMMGQGTAIYADTLTSNSEPNNTYFQTQTLTTTDSEKKVVQPQQKDYYTELLDQWNSIIAGNDAYDKTNPDMVTFHNKAEKDAQNIIKSYQGPDHENRTYLGNMQRIIPLLLISRKLTAILKKISKMKSLMEDSTISTNGLTQQLKIYNDMDRVTYHNKGLDFAFGLSMTSKNVARYESINGENLKGWHTGAGMSYLYNSDVKHYRDNFWATADMKRLAGTTTLDNEEPKSTDVKKSSKTFVGGTKFDDQHASIGMDFENQDKTLTAKKSYFILNDKIVFLGTGIKSTDSSKNPVTTIENRKANDYKLYKDDTQTTNSDNQETNSLFLESTNSTQNNIGYHFLNESKITVKKESHTGKWSDINKSQKDIQKTDEYYEVTQKHSNTDSKYAYVLYPGLSKDVFKSKASKVTVVKQEDDFHVVKDNESVWAGINYSDSAKTFEINNTKVEVKAKGMFILTKKDDNTYECSFYNPESTNSVSDIESKISMTGYSIINKNTSTSNESGVRFELTK

SEQ ID NO: 90 - protein, 635 aa, Streptococcus pyogenes
  Streptococcus pyogenes strain MGAS9429 hyaluronate lyase precursor
MAFMYEHAYNLNRENHQTTGKENKENWWVYEIGTPRAINNTLSLMYPYFTQEEILKYTAPIEKFVPDPTRFRVRAANFSPFEASSGNLIDMGRVKLISGILRKDDLEISDTIKAIEKVFTLVDEGNGFYQDGSLIDHVVTNAQSPLYKKGIAYTGAYGNVLIDGLSQLIPIIQKTKSPIEADKMATIYHWINHSFFPIIVRGEMMDMTRGRSISRFNAQSHVAGIEALRAILRIADMSEEPHRLALKTRIKTLVTQGNAFYNVYDNLKTYHDIKLMKELLSDTSVPVQKLDSYVASFNSMDKLALYNNKHDFAFGLSMFSNRTQNYEAMNNENLHGWFTSDGMFYLYNNDLGHYSENYWATVNPYRLPGTTETEQKPLEGTPENIKTNYQQVGMTSLSDDAFVASKKLNNTSALAAMTFTNWNKSLTLNKGWFILGNKIIFVGSNIKNQSSHKAYTTIEQRKENQKHPYCSYVNNQPVDLNNQLVDFTNTKSIFLESDDPAQNIGYYFFKPTTLSISKALQTGKWQNIKADDKSPEAIKEVSNTFITIMQNHTQDGDRYAYMMLPNMTRQEFETYISKLDIDLLENNDKLAAVYDHDSQQMHVIHYEKKATMFSNHNLSHQGFYSFPHPVKQNQQ

SEQ ID NO: 91 - protein, 828 aa, Streptococcus pyogenes
  Streptococcus pyogenes serotype M12, strain MGAS9429 hyaluronate lyase precursor
MVYFYLVNQSTFIISFLYWRNLSVNTYFCTHHKQLLLYSNLFLSFAMMGQGTAIYADTLTSNSEPNNTYFQTQTLTTTDSEKKVVQPQQKDYYTELLDQWNSIIAGNDAYVKTNPDMVTFHNKAEKDAQNIIKSYQGPDHENRTYLWEHAKDYSASTNITKTYRNIEKIAKQITNPESCYYQDSKAIAIVKDGMAFMYEHAYNLNRENHQTTGKENKENWWVYEIGTPRAINNTLSLMYPYFTQEEILKYTAPIEKFVPDPTRFRVRAANFSPFEASSGNLIDMGRVKLISGILRKDDLEISDTIKAIEKVFTLVDEGNGFYQDGSLIDHVVTNAQSPLYKKGIAYTGAYGNVLIDGLSQLIPIIQKTKSPIEADKMATIYHWINHSFFPIIVRGEMMDMTRGRSISRFNAQSHVAGIEALRAILRIADMSEEPHRLALKTRIKTLVTQGNAFYNVYDNLKTYHDIKLMKELLSDTSVPVQKLDSYVASFNSMDKLALYNNKHDFAFGLSMFSNRTQNYEAMNNENLHGWFTSDGMFYLYNNDLGHYSENYWATVNPYRLPGTTETEQKPLEGTPENIKTNYQQVGMTSLSDDAFVASKKLNNTSALAAMTFTNWNKSLTLNKGWFILGNKIIFVGSNIKNQSSHKAYTTIEQRKENQKHPYCSYVNNQPVDLNNQLVDFTNTKSIFLESDDPAQNIGYYFFKPTTLSISKALQTGKWQNIKADDKSPEAIKEVSNTFITIMQNHTQDGDRYAYMMLPNMTRQEFETYISKLDIDLLENNDKLAAVYDHDSQQMHVIHYEKKATMFSNHNLSHQGFYSFPHPVKQNQQ

SEQ ID NO: 92 - protein, 828 aa, Streptococcus pyogenes
  Streptococcus pyogenes serotype M28 strain MGAS6180
MVYFYLVNQFTFIISFLYRRNLSVNTYFCTHHKQLLLYSNLFLSFAMMGQGTAIYADTLTSNSEPNNTYFQTQMLTTTDSEKKVVQPQQKDYYTELLDQWNSIIAGNDAYDKTNPDMVTFHNKAEKDAQNIIKSYQGPDHENRTYLWEHAKDYSASANITKTYRNIEKIAKQITNPESCYYQDSKAIAIVKDGMAFMYEHAYNLDRENHQTTGKENKENWWVYEIGTPRAINNTLSLMYPYFTQEEILKYTAPIEKFVPDPTRFRVRAANFSPFEANSGNLIDMGRVKLISGILRKDDLEISDTIKAIEKVFTLVDEGNGFYQDGSLIDHVVTNAQSPLYKKGIAYTGAYGNVLIDGLSQLIPIIQKTKSSIEADKMATIYHWINHSFFPIIVRGEMMDMTRGRSISRFNAQSHVAGIEALRAILRIADMSEEPHRLALKTRIKTLVTQGNAFYNVYDNLKTYHDIKLMKELLSDTSVPVQKLDSYVASFNSMDKLALYNNKHDFAFGLSMFSNRTQNYEAMNNENLHGWFTSDGMFYLYNNDLGHYSENYWATVNPYRLPGTTETEQKPLEGTPENIKTNYQQVGMTSLSDDAFVASKKLNNTSALAAMTFTNWNKSLTLNKGWFILGNKIIFVGSNIKNQSSHKAYTTIEQRKENQKHPYHAYVNNQPVDLNNQLVDFTNTKSIFLESDDSAQNIGYYFFKPTTLSISKALQTGKWQNIKADDKSPEAIKEVSNTFITIMQNHTQDGDRYAYMMLPNMTRQEFETYISKLDIDLLENNDKLAAVYDHDSQQMHVIHYEKKATMFSNHNLSHQGFYSFPHPVKQNQQ

SEQ ID NO: 93 - protein, 522 aa, Streptococcus suis
  Streptococcus suis 05ZYH33 hyaluronidase
  SIGNAL (1)...(35): signal sequence
MGFFISQSKQHYGIRKYKVGVCSALIALSILGTRVAANQLPSTETASPQSSQLVETTPETTEAVNLTTEAVMTSEVSSEVSPVTSTETQPSSTAAETLASPQAVQATKEEEKNLVANGEFASTTAASGNWADPAATNWETWIPANVKKENGQVRIDEGRLHISSTASYRVAVHQTVDVDPNKRYLFSYNVETKDLKGSGVRVRLRSLTAEGKDLSPQEFAYTPYKNGSQAEHIEQILTVSPETRKLKVELFFENSVGQAWLDNISLVEYVEKTPETPEPSLELVQPETGQISLASNKVYLPVRPDLTYRIADAAVAIVEKNMIRPLAAGKTQVDVYDKDTKLSSFELTVTEHQATVFDTLRNNWEDISLANKRYQSNDTQMKAFLGRLDAGVASSLKKWVEPTNQGKTIFNDIDFSKSSHLTTVYRRLEQMAQVVENPDSAYYHDRSLIDLVRKGMNWLYTNVYNENKSIDGNWWDYEIGTPRAVVNTLIYMHPYFSQEEILTYTKPISKFVPDPTTISVKH

SEQ ID NO: 94 - protein, 1164 aa, Streptococcus suis
  Streptococcus suis hyaluronidase
  SIGNAL (1)...(37): signal sequence
MGFFISQSKQHYGIRKYKVGVCSALIALSILGTRVAANQLPSTETASPQSSQLVETTPETTEAVMTSEVSSEVSPVTSTETQPSSTTAETLASPQAVQATKEEKNLVANGEFISTTAPSGNWKELAATNWETWIPANVKKENGQVRIDEGRLHISSTASYRVAVHQTVDVDPNKRYLFSYDVETKDLKGSGVRVRLRSLTAEGKDLSPQEFAYTPYKNGSQAEHIEQILTVSPETRKLKVELFFENSVGQAWLDNISLVEYVEKTPETPEQSPELVQPETGQISLASNKVYLPVRPDLTYRIADAAVATVEKNMIRPLAAGKTQVDVYDKDTKLSSFELIVTEHQATVFDTLRNNWEDISLANKRYQSNDAQMKAFLGRLDAGVASSLEKWVEPTEQSKTIFNDIDFSKSSHLTTVYRRLEQMAQVVENPDSAYYHDRSLIDLVRKGMNWLYANVYNENKSIDGNWWDYEIGTSRAVVNTLIYMHPYFSQEEILTYTKPISKFVPDPTTIRKTLTNPVPAVGGNQTDLSKVAILEGALREDADRVRAGAQGLTTIMKFVDKGEGFYRDGSFIDHTNVAYTGAYGNVLIEGFSQLLPVIQPTEFALKEEQTNILYEWIEKAFMPILVRGELMDMTRGRSISRATGESHVQAMEILRSLVRIAESAQPEQKTKLLSFVKAQLTSDTFYDSYRSLKSYKDIDLVNKLLADNQIPAEVDKDYIAAFNNMDKFVYRSAQEGFTFALSMYSSRTQNYEDMNNENRKGWYTADGMVYLYNDDLSHYSNHYWATVDPYRLPGTTTTKDKREDGSGEVTLASDFVGASQLGNRLATIAMDFNNWNNSLTARKAWIVLGNKIVFLGTDIQHQSAQGAETTIENRKLLTGEKYSYYINGQPVDLSKEVVTDKTQSFYMTNGKDNQSIGYVFLNQLPTHAKLDQRTGKWSDINYNQSKEEVSNSFVSLWHEHAQTSSNYAYVLVPNQSMEKVNQAAASVKLLHQDRDLQVVYDQEQNVWGVVKYTDTAYKLTDDITLTDAGLYTIQKVEGGYRIAFYNPSTRTVKNGIELTKAGSSLTVEMEPTAAYPSTVWKVTMPEGSDKQTGSVEKTEKEEKQLKENQPSSEVKQVVHHAAEKTKPSKPRLPQTGEEASLGLGFLGLLTLGAVVDFKCRRSHS

SEQ ID NO: 95 - protein, 1164 aa, Streptococcus suis
  Streptococcus suis ST3 hyaluronidase
  SIGNAL (1)...(36): signal sequence
MGFFISQSKQHYGIRKYKVGVCSALIALSILGTRVAANQLPSTETASPQSSQLVETTPETTEAVMTSEVSSEVSPVTSTETQPSSTTAETLASPQAVQATKEEKNLVANGEFISTTAPSGNWKELAATNWETWIPANVKKENGQVRIDEGRLHISSTASYRVAVHQTVDVDPNKRYLFSYDVETKDLKGSGVRVRLRSLTAEGKDLSPQEFAYTPYKNGSQAEHIEQILTVSPETRKLKVELFFENSVGQAWLDNISLVEYVEKTPETPEQSPELVQPETGQISLASNKVYLPVRPDLTYRIADAAVATVEKNMIRPLAAGKTQVDVYDKDTKLSSFELIVTEHQATVFDTLRNNWEDISLANKRYQSNDAQMKAFLGRLDAGVASSLEKWVEPTEQSKTIFNDIDFSKSSHLTTVYRRLEQMAQVVENPDSAYYHDRSLIDLVRKGMNWLYTNVYNENKSIDGNWWDYEIGTPRAVVNTLIYMHPYFSQEEILTYTKPISKFVPDPTTIRKTLTNPVPAVGGNQTDLSKVAILEGALREDADRVRAGAQGLTTIMKFVDKGEGFYRDGSFIDHTNVAYTGAYGNVLIEGFSQLLPVIQPTEFALKEEQTNILYEWIEKAFMPILVRGELMDMTRGRSISRATGESHVQAMEILRSLVRIAESAQPEQKTKLLSFVKAQLTSDTFYDSYRSLKSYKDIDLVNKLLADNQIPAEVDKDYIAAFNNMDKFVYRSAQEGFTFALSMYSSRTQNYEDMNNENRKGWYTADGMVYLYNDDLSHYSNHYWATVDPYRLPGTTTTKDKREDGSGEVTLASDFVGASQLGNRLATIAMDFNNWNNSLTARKAWIVLGNKIVFLGTDIQHQSAQGAETTIENRKLLTGEKYSYYINGQPVDLSKEVVTDKTQSFYMTNGKDNQSIGYVFLNQLPTHAKLDQRTGKWSDINYNQSKEEVSNSFVSLWHEHAQTSSNYAYVLVPNQSMEKVNQAAASVKLLHQDRDLQVVYDQEQNVWGVVKYTDTAYKLTDDITLTDAGLYTIQKVEGGYRIAFYNPSTRTVKNGIELTKAGSSLTVEMEPTAAYPSTVWKVTMPEGSDKQTGSVEKTEKEEKQLKENQPSSEVKQVVHHAAEKTKPSKPRLPQTGEEASLGLGFLGLLTLGAVVDFKCRRSHS

SEQ ID NO: 96 - protein, 802 aa, Vibrio fischeri
  Vibrio fischeri strain ATCC 700601/ES114 hyaluronate lyase precursor
  SIGNAL (1)...(26): signal sequence
MYMIKKHRLNTIALSMLFLFTGNAYAAKNTQTPQYLPSDFEQVRENWAENYLGDPAITFDQTLKNMVTSTNSSAQKHWDSMTPQPNASGIWDDLPLIDKDTTLGPNIRNSYQRLFTMAKAYRLRDGNLENNQLMLNDIMTAMNYINQNFYFVNQLEYGNWWQWELAIPKDIHNILVLLFDDIKDNYQTIITNHLNATRYFTPDPTHLGVSPGAAESTNPNYRESTGGNRTDNAQVVLIRGMLENNSEEISQAIAALPAVIEYVSEGDGYYTDGSFLQHSDIAYNGTYGNVLLGGLGIQMNAVAGSPWSMDNQTISNVYNIINQSYEPLLYKGAMMDMVNGRSISRSAEQNHDVGLNIVNSMLFYTNGPDSDKNKQLSSLIKTQITDDTYQNFFDKIYYVSTYQAAQHIVNDPTVSLKDPLIGNFSYPSMDRIVHRRTDWAFALAMHSYRIGNYECMNGENLKGWFTGDGMIYLYNDQLDHYTGYWPTVNASRMPGTTVDSQIMADCSGERVGGNVNTNMQWVGSTSLNNYGIAGMQFYNWSDTLSAYKSWFMFDNEVVMLGSNIKDQSNANNITTIENRKRLAETKLFIDGTEQAALPYQGAPATFSIRNKTLANSDLSYVMLTPKTISISQNDVDGNWSDIGNSKGDVSDSYLQATLTQVDQADYQYALLPNQNNDTVQNYAQHPDVTVLRQDEQAHAVQENTLNIIAANNWKNNPVNITDTITLNSMMGFMIKEESSNTFTVAVSEPIQTIDSVNFTFDKQGIVIKEDIENRVVLNGTTLTINTSGLQGQSYSFQVTIQD

SEQ ID NO: 97 - protein, 517 aa, Synechococcus sp.
  Synechococcus sp. RCC307 neutral invertase-like protein
MGAPAIPKVPRSPSKSEHTTRPNSGESEVVRQAEELFEQTLVNVRGQLAGAVAALESSVHDSELNYGEIFLRDNVPVMVYLLLRGRFEIVRHFLDLCLELQSRSYRTRGVFPTSFVEEDDKILADYGQRSIGRITSVDASLWWPVLCWMYVRASGDTSYGTSPKVQRAVQLLLDLVLQPSFYEPPVLFVPDCAFMIDRPMDVWGAPLEVEVLLFGCLKSCCQLMSLVEGGGHGGPLIQQRLELTRTWMRDLRVYLLNHYWVTSKTMQVLRRRPTEQYGDYQSRNEFNVQPEVIPHWLQEWLDDRGGYLIGNMRTGRPDFRFYSLGNALGSLFGLLTGPQQLALFRLVIHNRQHLMAEMPMRICHPPMDQDEWITNTGMDPKNWPWSYHNGGHWPSLLWPMAAAVLMHQRLYPNDDLLLLGQTRTMLEECYWQQLNQLPRQQWAEYFDGPTGTWVGQQARINQTWTIVGFLLLHHLMRKAPQDVKLLDLDDVGPLRLSFQDQHEKSSTDERKSFLKNY

SEQ ID NO: 98 - protein, 1021 aa, Proteus vulgaris
  Proteus vulgaris chondroitin-sulfate-ABC endolyase
  SIGNAL (1)...(24)
MPIFRFTALAMTLGLLSAPYNAMAATSNPAFDPKNLMQSEIYHFAQNNPLADFSSDKNSILTLSDKRSIMGNQSLLWKWKGGSSFTLHKKLIVPTDKEASKAWGRSSTPVFSFWLYNEKPIDGYLTIDFGEKLISTSEAQAGFKVKLDFTGWRAVGVSLNNDLENREMTLNATNTSSDGTQDSIGRSLGAKVDSIRFKAPSNVSQGEIYIDRIMFSVDDARYQWSDYQVKTRLSEPEIQFHNVKPQLPVTPENLAAIDLIRQRLINEFVGGEKETNLALEENISKLKSDFDALNIHTLANGGTQGRHLITDKQIIIYQPENLNSQDKQLFDNYVILGNYTTLMFNISRAYVLEKDPTQKAQLKQMYLLMTKHLLDQGFVKGSALVTTHHWGYSSRWWYISTLLMSDALKEANLQTQVYDSLLWYSREFKSSFDMKVSADSSDLDYFNTLSRQHLALLLLEPDDQKRINLVNTFSHYITGALTQVPPGGKDGLRPDGTAWRHEGNYPGYSFPAFKNASQLIYLLRDTPFSVGESGWNNLKKAMVSAWIYSNPEVGLPLAGRHPFNSPSLKSVAQGYYWLAMSAKSSPDKTLASIYLAISDKTQNESTAIFGETITPASLPQGFYAFNGGAFGIHRWQDKMVTLKAYNTNVWSSEIYNKDNRYGRYQSHGVAQIVSNGSQLSQGYQQEGWDWNRMEGATTIHLPLKDLDSPKPHTLMQRGERGFSGTSSLEGQYGMMAFNLIYPANLERFDPNFTAKKSVLAADNHLIFIGSNINSSDKNKNVETTLFQHAITPTLNTLWINGQKIENMPYQTTLQQGDWLIDSNGNGYLITQAEKVNVSRQHQVSAENKNRQPTEGNFSSAWIDHSTRPKDASYEYMVFLDATPEKMGEMAQKFRENNGLYQVLRKDKDVHIILDKLSNVTGYAFYQPASIEDKWIKKVNKPAIVMTHRQKDTLIVSAVTPDLNMTRQKAATPVTINVTINGKWQSADKNSEVKYQVSGDNTELTFTSYFGIPQEIKLSPLP

SEQ ID NO: 99 - protein, 684 aa, Pedobacterium heparinum
  Pedobacter heparinus DSM 2366 chondroitin AC lyase
PALLIAQQTGTAELIMKRVMLDLKKPLRNMDKVAEKNLNTLQPDGSWKDVPYKDDAMTNWLPNNHLLQLETIIQAYIEKDSHYYGDDKVFDQISKAFKYWYDSDPKSRNWWHNEIATPQALGEMLILMRYGKKPLDEALVHKLTERMKRGEPEKKTGANKTDIALHYFYRALLTSDEALLSFAVKELFYPVQFVHYEEGLQYDYSYLQHGPQLQISSYGAVFITGVLKLANYVRDTPYALSTEKLAIFSKYYRDSYLKAIRGSYMDFNVEGRGVSRPDILNKKAEKKRLLVAKMIDLKHTEEWADAIARTDSTVAAGYKIEPYHHQFWNGDYVQHLRPAYSFNVRMVSKRTRRSESGNKENLLGRYLSDGATNIQLRGPEYYNIMPVWEWDKIPGITSRDYLTDRPLTKLWGEQGSNDFAGGVSDGVYGASAYALDYDSLQAKKAWFFFDKEIVCLGAGINSNAPENITTTLNQSWLNGPVISTAGKTGRGKITTFKAQGQFWLLHDAIGYYFPEGANLSLSTQSQKGNWFHINNSHSKDEVSGDVFKLWINHGARPENAQYAYIVLPGINKPEEIKKYNGTAPKVLANTNQLQAVYHQQLDMVQAIFYTAGKLSVAGIEIETDKPCAVLIKHINGKQVIWAADPLQKEKTAVLSIRDLKTGKTNRVKIDFPQQEFAGATVELK

SEQ ID NO: 100 - protein, 844 aa, Victivallis vadensis
  Victivallis vadensis ATCC BAA-548 chondroitin AC lyase
  SIGNAL (1)...(22): signal sequence
MHRKIVFPLFVLLFTAFAAFAASQPQWKWRQSKYCRITEHAGKKLLTVAIPADAPEISRRNTADTPVGLTCFEGQPIEFSIRLRNSGISRPDNLHNGIKFQLYFRDGNGTERWTQAEIPHEPFPWRRFRFSERIPADATSGTLRLGLQGSSGNVEFDLDSLQIRPLDPELSPVPPTPEQIRECELIESRLRAGLPAQQPPPGPEVKKLLERQNGDGTFRDLDYSARNRSIWPAARHLKRTFELALARATPGHALYRDPAAGEAVRKAVAWWAERQPQNGNWWWNDMYVPKILGNILLLSPELFPDGPRRRAALNVCRQACFLSRYTGNNRVFIAANIFCRALLERNLPVMDRAAAVLSEEIRFAPAEHKTAWSFGGIRADGCYHQHGPQIQFGNYGGEFLANIAYWSNILKETHWELSPEQWRIMRHLTFNGFQWVLWRGRMDLLACGRQLGRNAAETKGERTLNAFAQLRNADPGDRAPYDAALRRNRDGENTLTGNRHFWNSDYMVHRRPTWYASVRMNSVRVRPIEDDTNWDNALGRYFSDGACLVMRSGREYENITACWDWTRLPGTTLPKTPVYTGEDARRFGLKIGGGDLPRWTHSRNWRQLGETGFVGGVTDGERGAAVYTQDLDGVRARKAWFFDRDAIYCLGSGITSTSPYEVATTVNSCLRNGEIQQGDGWFRHDGIGYRGENLKLTAGPRTGDWRYVEGGLTRPVPETKELFTLTVEHGVKPRNASYIYTILPGATPEETAGTPPGRVLRNTPECQAVEFADGVRAAIFYEPGRLDDFETDTPGVFLIGKGTVHAADPTGRHSSFTLKLNGVSRKVPLPAGEFAGQSVKIVLK

SEQ ID NO: 101 - protein, 510 aa, Pan troglodyte
  Chimpanzee PH20
MGVLKFKHIFFRSFVKSSGVSQIVFTFLLIPCCLTLNFRAPPVIPNVPFLWAWNAPSEFCLGKFDEPLDMSLFSFIGSPRINVTGQDVTIFYVDRLGYYPYIDSITGVTVNGGIPQKISLQDHLDKAKKDITFYMPVDNLGMAVIDWEEWRPTWARNWKPKDVYKNRSIELVQQQNVQLSLTEATEKAKQEFEKAGKDFLVETIKLGKLLRPNHLWGYYLFPDCYNHHYKKPGYNGSCFNVEIKRNDDLSWLWNESTALYPSIYLNTQQSPVAATLYVRNRVQEAIRVSKIPDAKSPLPVFVYTRIVFTDQVLKFLSQDELVYTFGETVALGASGIVIWGTLSIMRSMKSCLLLDNYMETILNPYIINVTLAAKMCSQVLCQEQGVCIRKNWNSSDYLHLNPDNFAIQLEKGGKFTVRGKPTLEDLEQFSEKFYCSCYSTLSCKEKADVKDTDAVDVCIADGVCIDAFLKPPMETEESQIFYNASPSTLSATMFIDLCDLYLVPTSYLIL

SEQ ID NO: 102 - protein, 512 aa, Macaca mulatta
  Rhesus Monkey PH20
MGVLKFKHIFFRSFVKSSGVSQIVFTFLLIPCCLTLNFRAPPIIPNVPFLWAWNAPSEFCLGKFNEPLDMSLFTLMGSPRINITGQGVTIFYVDRLGYYPYIDLTTGVTVHGGIPQKVSLQDHLDKSKQDILFYMPVDNLGMAVIDWEEWRPTWARNWKPKDVYKNRSIELVQQQNVQLSLPQATDKAKQEFEKAGKDFMLETIKLGRSLRPNHLWGYYLFPDCYNHHYRKPGYNGSCFDVEIKRNDDLSWLWNESTALYPSIYLNTQQSVVVATLYVRNRVREAIRVSKIPDAKNPLPVFVYARLVFTDQVLKFLSREELVSTLGETVALGASGIVIWGSLSITRSMKSCLLLDTYMETILNPYIINVTLAAKMCSQVLCQEQGVCIRKDWNSSDYLHLNPDNFDIRLEKGGKFTVHGKPTVEDLEEFSEKFYCSCYTNLSCKEKADVKDTDAVDVCIADGVCIDASLKPPVETEGSPPIFYNTSSSTVSTTMFIWRLEVWDQGISRIGFF

SEQ ID NO: 103 - protein, 505 aa, Homo sapiens
  precursor soluble human PH20, amino acid residues 1-505
  SIGNAL (1)...(35): signal sequence
MGVLKFKHIFFRSFVKSSGVSQIVFTFLLIPCCLTLNFRAPPVIPNVPFLWAWNAPSEFCLGKFDEPLDMSLFSFIGSPRINATGQGVTIFYVDRLGYYPYIDSITGVTVNGGIPQKISLQDHLDKAKKDITFYMPVDNLGMAVIDWEEWRPTWARNWKPKDVYKNRSIELVQQQNVQLSLTEATEKAKQEFEKAGKDFLVETIKLGKLLRPNHLWGYYLFPDCYNHHYKKPGYNGSCFNVEIKRNDDLSWLWNESTALYPSIYLNTQQSPVAATLYVRNRVREAIRVSKIPDAKSPLPVFAYTRIVFTDQVLKFLSQDELVYTFGETVALGASGIVIWGTLSIMRSMKSCLLLDNYMETILNPYIINVTLAAKMCSQVLCQEQGVCIRKNWNSSDYLHLNPDNFAIQLEKGGKFTVRGKPTLEDLEQFSEKFYCSCYSTLSCKEKADVKDTDAVDVCIADGVCIDAFLKPPMETEEPQIFYNASPSTLSATMFIVSILFLIISS

SEQ ID NO: 104 - protein, 503 aa, Homo sapiens
  precursor soluble human PH20, amino acid residues 1-503
  SIGNAL (1)...(35): signal sequence
MGVLKFKHIFFRSFVKSSGVSQIVFTFLLIPCCLTLNFRAPPVIPNVPFLWAWNAPSEFCLGKFDEPLDMSLFSFIGSPRINATGQGVTIFYVDRLGYYPYIDSITGVTVNGGIPQKISLQDHLDKAKKDITFYMPVDNLGMAVIDWEEWRPTWARNWKPKDVYKNRSIELVQQQNVQLSLTEATEKAKQEFEKAGKDFLVETIKLGKLLRPNHLWGYYLFPDCYNHHYKKPGYNGSCFNVEIKRNDDLSWLWNESTALYPSIYLNTQQSPVAATLYVRNRVREAIRVSKIPDAKSPLPVFAYTRIVFTDQVLKFLSQDELVYTFGETVALGASGIVIWGTLSIMRSMKSCLLLDNYMETILNPYIINVTLAAKMCSQVLCQEQGVCIRKNWNSSDYLHLNPDNFAIQLEKGGKFTVRGKPTLEDLEQFSEKFYCSCYSTLSCKEKADVKDTDAVDVCIADGVCIDAFLKPPMETEEPQIFYNASPSTLSATMFIVSILFLII

SEQ ID NO: 105 - protein, 501 aa, Homo sapiens
  precursor soluble human PH20, amino acid residues 1-501
  SIGNAL (1)...(35): signal sequence
MGVLKFKHIFFRSFVKSSGVSQIVFTFLLIPCCLTLNFRAPPVIPNVPFLWAWNAPSEFCLGKFDEPLDMSLFSFIGSPRINATGQGVTIFYVDRLGYYPYIDSITGVTVNGGIPQKISLQDHLDKAKKDITFYMPVDNLGMAVIDWEEWRPTWARNWKPKDVYKNRSIELVQQQNVQLSLTEATEKAKQEFEKAGKDFLVETIKLGKLLRPNHLWGYYLFPDCYNHHYKKPGYNGSCFNVEIKRNDDLSWLWNESTALYPSIYLNTQQSPVAATLYVRNRVREAIRVSKIPDAKSPLPVFAYTRIVFTDQVLKFLSQDELVYTFGETVALGASGIVIWGTLSIMRSMKSCLLLDNYMETILNPYIINVTLAAKMCSQVLCQEQGVCIRKNWNSSDYLHLNPDNFAIQLEKGGKFTVRGKPTLEDLEQFSEKFYCSCYSTLSCKEKADVKDTDAVDVCIADGVCIDAFLKPPMETEEPQIFYNASPSTLSATMFIVSILFL

SEQ ID NO: 106 - protein, 499 aa, Homo sapiens
  precursor soluble human PH20, amino acid residues 1-499
  SIGNAL (1)...(35): signal sequence
MGVLKFKHIFFRSFVKSSGVSQIVFTFLLIPCCLTLNFRAPPVIPNVPFLWAWNAPSEFCLGKFDEPLDMSLFSFIGSPRINATGQGVTIFYVDRLGYYPYIDSITGVTVNGGIPQKISLQDHLDKAKKDITFYMPVDNLGMAVIDWEEWRPTWARNWKPKDVYKNRSIELVQQQNVQLSLTEATEKAKQEFEKAGKDFLVETIKLGKLLRPNHLWGYYLFPDCYNHHYKKPGYNGSCFNVEIKRNDDLSWLWNESTALYPSIYLNTQQSPVAATLYVRNRVREAIRVSKIPDAKSPLPVFAYTRIVFTDQVLKFLSQDELVYTFGETVALGASGIVIWGTLSIMRSMKSCLLLDNYMETILNPYIINVTLAAKMCSQVLCQEQGVCIRKNWNSSDYLHLNPDNFAIQLEKGGKFTVRGKPTLEDLEQFSEKFYCSCYSTLSCKEKADVKDTDAVDVCIADGVCIDAFLKPPMETEEPQIFYNASPSTLSATMFIVSIL

SEQ ID NO: 107 - protein, 497 aa, Homo sapiens
  precursor soluble human PH20, amino acid residues 1-497
  SIGNAL (1)...(35): signal sequence
MGVLKFKHIFFRSFVKSSGVSQIVFTFLLIPCCLTLNFRAPPVIPNVPFLWAWNAPSEFCLGKFDEPLDMSLFSFIGSPRINATGQGVTIFYVDRLGYYPYIDSITGVTVNGGIPQKISLQDHLDKAKKDITFYMPVDNLGMAVIDWEEWRPTWARNWKPKDVYKNRSIELVQQQNVQLSLTEATEKAKQEFEKAGKDFLVETIKLGKLLRPNHLWGYYLFPDCYNHHYKKPGYNGSCFNVEIKRNDDLSWLWNESTALYPSIYLNTQQSPVAATLYVRNRVREAIRVSKIPDAKSPLPVFAYTRIVFTDQVLKFLSQDELVYTFGETVALGASGIVIWGTLSIMRSMKSCLLLDNYMETILNPYIINVTLAAKMCSQVLCQEQGVCIRKNWNSSDYLHLNPDNFAIQLEKGGKFTVRGKPTLEDLEQFSEKFYCSCYSTLSCKEKADVKDTDAVDVCIADGVCIDAFLKPPMETEEPQIFYNASPSTLSATMFIVS

SEQ ID NO: 108 - protein, 495 aa, Homo sapiens
  precursor soluble human PH20, amino acid residues 1-495
  SIGNAL (1)...(35): signal sequence
MGVLKFKHIFFRSFVKSSGVSQIVFTFLLIPCCLTLNFRAPPVIPNVPFLWAWNAPSEFCLGKFDEPLDMSLFSFIGSPRINATGQGVTIFYVDRLGYYPYIDSITGVTVNGGIPQKISLQDHLDKAKKDITFYMPVDNLGMAVIDWEEWRPTWARNWKPKDVYKNRSIELVQQQNVQLSLTEATEKAKQEFEKAGKDFLVETIKLGKLLRPNHLWGYYLFPDCYNHHYKKPGYNGSCFNVEIKRNDDLSWLWNESTALYPSIYLNTQQSPVAATLYVRNRVREAIRVSKIPDAKSPLPVFAYTRIVFTDQVLKFLSQDELVYTFGETVALGASGIVIWGTLSIMRSMKSCLLLDNYMETILNPYIINVTLAAKMCSQVLCQEQGVCIRKNWNSSDYLHLNPDNFAIQLEKGGKFTVRGKPTLEDLEQFSEKFYCSCYSTLSCKEKADVKDTDAVDVCIADGVCIDAFLKPPMETEEPQIFYNASPSTLSATMFI

SEQ ID NO: 109 - protein, 493 aa, Homo sapiens
  precursor soluble human PH20, amino acid residues 1-493
  SIGNAL (1)...(35): signal sequence
MGVLKFKHIFFRSFVKSSGVSQIVFTFLLIPCCLTLNFRAPPVIPNVPFLWAWNAPSEFCLGKFDEPLDMSLFSFIGSPRINATGQGVTIFYVDRLGYYPYIDSITGVTVNGGIPQKISLQDHLDKAKKDITFYMPVDNLGMAVIDWEEWRPTWARNWKPKDVYKNRSIELVQQQNVQLSLTEATEKAKQEFEKAGKDFLVETIKLGKLLRPNHLWGYYLFPDCYNHHYKKPGYNGSCFNVEIKRNDDLSWLWNESTALYPSIYLNTQQSPVAATLYVRNRVREAIRVSKIPDAKSPLPVFAYTRIVFTDQVLKFLSQDELVYTFGETVALGASGIVIWGTLSIMRSMKSCLLLDNYMETILNPYIINVTLAAKMCSQVLCQEQGVCIRKNWNSSDYLHLNPDNFAIQLEKGGKFTVRGKPTLEDLEQFSEKFYCSCYSTLSCKEKADVKDTDAVDVCIADGVCIDAFLKPPMETEEPQIFYNASPSTLSATM

SEQ ID NO: 110 - protein, 491 aa, Homo sapiens
  precursor soluble human PH20, amino acid residues 1-491
  SIGNAL (1)...(35): signal sequence
MGVLKFKHIFFRSFVKSSGVSQIVFTFLLIPCCLTLNFRAPPVIPNVPFLWAWNAPSEFCLGKFDEPLDMSLFSFIGSPRINATGQGVTIFYVDRLGYYPYIDSITGVTVNGGIPQKISLQDHLDKAKKDITFYMPVDNLGMAVIDWEEWRPTWARNWKPKDVYKNRSIELVQQQNVQLSLTEATEKAKQEFEKAGKDFLVETIKLGKLLRPNHLWGYYLFPDCYNHHYKKPGYNGSCFNVEIKRNDDLSWLWNESTALYPSIYLNTQQSPVAATLYVRNRVREAIRVSKIPDAKSPLPVFAYTRIVFTDQVLKFLSQDELVYTFGETVALGASGIVIWGTLSIMRSMKSCLLLDNYMETILNPYIINVTLAAKMCSQVLCQEQGVCIRKNWNSSDYLHLNPDNFAIQLEKGGKFTVRGKPTLEDLEQFSEKFYCSCYSTLSCKEKADVKDTDAVDVCIADGVCIDAFLKPPMETEEPQIFYNASPSTLSA

SEQ ID NO: 111 - protein, 489 aa, Homo sapiens
  precursor soluble human PH20, amino acid residues 1-489
  SIGNAL (1)...(35): signal sequence
MGVLKFKHIFFRSFVKSSGVSQIVFTFLLIPCCLTLNFRAPPVIPNVPFLWAWNAPSEFCLGKFDEPLDMSLFSFIGSPRINATGQGVTIFYVDRLGYYPYIDSITGVTVNGGIPQKISLQDHLDKAKKDITFYMPVDNLGMAVIDWEEWRPTWARNWKPKDVYKNRSIELVQQQNVQLSLTEATEKAKQEFEKAGKDFLVETIKLGKLLRPNHLWGYYLFPDCYNHHYKKPGYNGSCFNVEIKRNDDLSWLWNESTALYPSIYLNTQQSPVAATLYVRNRVREAIRVSKIPDAKSPLPVFAYTRIVFTDQVLKFLSQDELVYTFGETVALGASGIVIWGTLSIMRSMKSCLLLDNYMETILNPYIINVTLAAKMCSQVLCQEQGVCIRKNWNSSDYLHLNPDNFAIQLEKGGKFTVRGKPTLEDLEQFSEKFYCSCYSTLSCKEKADVKDTDAVDVCIADGVCIDAFLKPPMETEEPQIFYNASPSTL

SEQ ID NO: 112 - protein, 490 aa, Homo sapiens
  precursor soluble human PH20, amino acid residues 1-490
  SIGNAL (1)...(35): signal sequence
MGVLKFKHIFFRSFVKSSGVSQIVFTFLLIPCCLTLNFRAPPVIPNVPFLWAWNAPSEFCLGKFDEPLDMSLFSFIGSPRINATGQGVTIFYVDRLGYYPYIDSITGVTVNGGIPQKISLQDHLDKAKKDITFYMPVDNLGMAVIDWEEWRPTWARNWKPKDVYKNRSIELVQQQNVQLSLTEATEKAKQEFEKAGKDFLVETIKLGKLLRPNHLWGYYLFPDCYNHHYKKPGYNGSCFNVEIKRNDDLSWLWNESTALYPSIYLNTQQSPVAATLYVRNRVREAIRVSKIPDAKSPLPVFAYTRIVFTDQVLKFLSQDELVYTFGETVALGASGIVIWGTLSIMRSMKSCLLLDNYMETILNPYIINVTLAAKMCSQVLCQEQGVCIRKNWNSSDYLHLNPDNFAIQLEKGGKFTVRGKPTLEDLEQFSEKFYCSCYSTLSCKEKADVKDTDAVDVCIADGVCIDAFLKPPMETEEPQIFYNASPSTLS

SEQ ID NO: 113 - protein, 487 aa, Homo sapiens
  precursor soluble human PH20, amino acid residues 1-487
  SIGNAL (1)...(35): signal sequence
MGVLKFKHIFFRSFVKSSGVSQIVFTFLLIPCCLTLNFRAPPVIPNVPFLWAWNAPSEFCLGKFDEPLDMSLFSFIGSPRINATGQGVTIFYVDRLGYYPYIDSITGVTVNGGIPQKISLQDHLDKAKKDITFYMPVDNLGMAVIDWEEWRPTWARNWKPKDVYKNRSIELVQQQNVQLSLTEATEKAKQEFEKAGKDFLVETIKLGKLLRPNHLWGYYLFPDCYNHHYKKPGYNGSCFNVEIKRNDDLSWLWNESTALYPSIYLNTQQSPVAATLYVRNRVREAIRVSKIPDAKSPLPVFAYTRIVFTDQVLKFLSQDELVYTFGETVALGASGIVIWGTLSIMRSMKSCLLLDNYMETILNPYIINVTLAAKMCSQVLCQEQGVCIRKNWNSSDYLHLNPDNFAIQLEKGGKFTVRGKPTLEDLEQFSEKFYCSCYSTLSCKEKADVKDTDAVDVCIADGVCIDAFLKPPMETEEPQIFYNASPS

SEQ ID NO: 114 - protein, 485 aa, Homo sapiens
  precursor soluble human PH20, amino acid residues 1-485
  SIGNAL (1)...(35): signal sequence
MGVLKFKHIFFRSFVKSSGVSQIVFTFLLIPCCLTLNFRAPPVIPNVPFLWAWNAPSEFCLGKFDEPLDMSLFSFIGSPRINATGQGVTIFYVDRLGYYPYIDSITGVTVNGGIPQKISLQDHLDKAKKDITFYMPVDNLGMAVIDWEEWRPTWARNWKPKDVYKNRSIELVQQQNVQLSLTEATEKAKQEFEKAGKDFLVETIKLGKLLRPNHLWGYYLFPDCYNHHYKKPGYNGSCFNVEIKRNDDLSWLWNESTALYPSIYLNTQQSPVAATLYVRNRVREAIRVSKIPDAKSPLPVFAYTRIVFTDQVLKFLSQDELVYTFGETVALGASGIVIWGTLSIMRSMKSCLLLDNYMETILNPYIINVTLAAKMCSQVLCQEQGVCIRKNWNSSDYLHLNPDNFAIQLEKGGKFTVRGKPTLEDLEQFSEKFYCSCYSTLSCKEKADVKDTDAVDVCIADGVCIDAFLKPPMETEEPQIFYNAS

SEQ ID NO: 115 - protein, 484 aa, Homo sapiens
  precursor soluble human PH20, amino acid residues 1-484
  SIGNAL (1)...(35): signal sequence
MGVLKFKHIFFRSFVKSSGVSQIVFTFLLIPCCLTLNFRAPPVIPNVPFLWAWNAPSEFCLGKFDEPLDMSLFSFIGSPRINATGQGVTIFYVDRLGYYPYIDSITGVTVNGGIPQKISLQDHLDKAKKDITFYMPVDNLGMAVIDWEEWRPTWARNWKPKDVYKNRSIELVQQQNVQLSLTEATEKAKQEFEKAGKDFLVETIKLGKLLRPNHLWGYYLFPDCYNHHYKKPGYNGSCFNVEIKRNDDLSWLWNESTALYPSIYLNTQQSPVAATLYVRNRVREAIRVSKIPDAKSPLPVFAYTRIVFTDQVLKFLSQDELVYTFGETVALGASGIVIWGTLSIMRSMKSCLLLDNYMETILNPYIINVTLAAKMCSQVLCQEQGVCIRKNWNSSDYLHLNPDNFAIQLEKGGKFTVRGKPTLEDLEQFSEKFYCSCYSTLSCKEKADVKDTDAVDVCIADGVCIDAFLKPPMETEEPQIFYNA

SEQ ID NO: 116 - protein, 476 aa, Homo sapiens
  precursor soluble human PH20, amino acid residues 1-476
  SIGNAL (1)...(35): signal sequence
MGVLKFKHIFFRSFVKSSGVSQIVFTFLLIPCCLTLNFRAPPVIPNVPFLWAWNAPSEFCLGKFDEPLDMSLFSFIGSPRINATGQGVTIFYVDRLGYYPYIDSITGVTVNGGIPQKISLQDHLDKAKKDITFYMPVDNLGMAVIDWEEWRPTWARNWKPKDVYKNRSIELVQQQNVQLSLTEATEKAKQEFEKAGKDFLVETIKLGKLLRPNHLWGYYLFPDCYNHHYKKPGYNGSCFNVEIKRNDDLSWLWNESTALYPSIYLNTQQSPVAATLYVRNRVREAIRVSKIPDAKSPLPVFAYTRIVFTDQVLKFLSQDELVYTFGETVALGASGIVIWGTLSIMRSMKSCLLLDNYMETILNPYIINVTLAAKMCSQVLCQEQGVCIRKNWNSSDYLHLNPDNFAIQLEKGGKFTVRGKPTLEDLEQFSEKFYCSCYSTLSCKEKADVKDTDAVDVCIADGVCIDAFLKPPMETE

SEQ ID NO: 117 - protein, 475 aa, Homo sapiens
  precursor soluble human PH20, amino acid residues 1-475
  SIGNAL (1)...(35): signal sequence
MGVLKFKHIFFRSFVKSSGVSQIVFTFLLIPCCLTLNFRAPPVIPNVPFLWAWNAPSEFCLGKFDEPLDMSLFSFIGSPRINATGQGVTIFYVDRLGYYPYIDSITGVTVNGGIPQKISLQDHLDKAKKDITFYMPVDNLGMAVIDWEEWRPTWARNWKPKDVYKNRSIELVQQQNVQLSLTEATEKAKQEFEKAGKDFLVETIKLGKLLRPNHLWGYYLFPDCYNHHYKKPGYNGSCFNVEIKRNDDLSWLWNESTALYPSIYLNTQQSPVAATLYVRNRVREAIRVSKIPDAKSPLPVFAYTRIVFTDQVLKFLSQDELVYTFGETVALGASGIVIWGTLSIMRSMKSCLLLDNYMETILNPYIINVTLAAKMCSQVLCQEQGVCIRKNWNSSDYLHLNPDNFAIQLEKGGKFTVRGKPTLEDLEQFSEKFYCSCYSTLSCKEKADVKDTDAVDVCIADGVCIDAFLKPPMET

SEQ ID NO: 118 - protein, 474 aa, Homo sapiens
  precursor soluble human PH20, amino acid residues 1-474
  SIGNAL (1)...(35): signal sequence
MGVLKFKHIFFRSFVKSSGVSQIVFTFLLIPCCLTLNFRAPPVIPNVPFLWAWNAPSEFCLGKFDEPLDMSLFSFIGSPRINATGQGVTIFYVDRLGYYPYIDSITGVTVNGGIPQKISLQDHLDKAKKDITFYMPVDNLGMAVIDWEEWRPTWARNWKPKDVYKNRSIELVQQQNVQLSLTEATEKAKQEFEKAGKDFLVETIKLGKLLRPNHLWGYYLFPDCYNHHYKKPGYNGSCFNVEIKRNDDLSWLWNESTALYPSIYLNTQQSPVAATLYVRNRVREAIRVSKIPDAKSPLPVFAYTRIVFTDQVLKFLSQDELVYTFGETVALGASGIVIWGTLSIMRSMKSCLLLDNYMETILNPYIINVTLAAKMCSQVLCQEQGVCIRKNWNSSDYLHLNPDNFAIQLEKGGKFTVRGKPTLEDLEQFSEKFYCSCYSTLSCKEKADVKDTDAVDVCIADGVCIDAFLKPPME

SEQ ID NO: 119 - protein, 473 aa, Homo sapiens
  precursor soluble human PH20, amino acid residues 1-473
  SIGNAL (1)...(35): signal sequence
MGVLKFKHIFFRSFVKSSGVSQIVFTFLLIPCCLTLNFRAPPVIPNVPFLWAWNAPSEFCLGKFDEPLDMSLFSFIGSPRINATGQGVTIFYVDRLGYYPYIDSITGVTVNGGIPQKISLQDHLDKAKKDITFYMPVDNLGMAVIDWEEWRPTWARNWKPKDVYKNRSIELVQQQNVQLSLTEATEKAKQEFEKAGKDFLVETIKLGKLLRPNHLWGYYLFPDCYNHHYKKPGYNGSCFNVEIKRNDDLSWLWNESTALYPSIYLNTQQSPVAATLYVRNRVREAIRVSKIPDAKSPLPVFAYTRIVFTDQVLKFLSQDELVYTFGETVALGASGIVIWGTLSIMRSMKSCLLLDNYMETILNPYIINVTLAAKMCSQVLCQEQGVCIRKNWNSSDYLHLNPDNFAIQLEKGGKFTVRGKPTLEDLEQFSEKFYCSCYSTLSCKEKADVKDTDAVDVCIADGVCIDAFLKPPM

SEQ ID NO: 120 - protein, 472 aa, Homo sapiens
  precursor soluble human PH20, amino acid residues 1-472
  SIGNAL (1)...(35): signal sequence
MGVLKFKHIFFRSFVKSSGVSQIVFTFLLIPCCLTLNFRAPPVIPNVPFLWAWNAPSEFCLGKFDEPLDMSLFSFIGSPRINATGQGVTIFYVDRLGYYPYIDSITGVTVNGGIPQKISLQDHLDKAKKDITFYMPVDNLGMAVIDWEEWRPTWARNWKPKDVYKNRSIELVQQQNVQLSLTEATEKAKQEFEKAGKDFLVETIKLGKLLRPNHLWGYYLFPDCYNHHYKKPGYNGSCFNVEIKRNDDLSWLWNESTALYPSIYLNTQQSPVAATLYVRNRVREAIRVSKIPDAKSPLPVFAYTRIVFTDQVLKFLSQDELVYTFGETVALGASGIVIWGTLSIMRSMKSCLLLDNYMETILNPYIINVTLAAKMCSQVLCQEQGVCIRKNWNSSDYLHLNPDNFAIQLEKGGKFTVRGKPTLEDLEQFSEKFYCSCYSTLSCKEKADVKDTDAVDVCIADGVCIDAFLKPP

SEQ ID NO: 121 - protein, 471 aa, Homo sapiens
  precursor soluble human PH20, amino acid residues 1-471
  SIGNAL (1)...(35): signal sequence
MGVLKFKHIFFRSFVKSSGVSQIVFTFLLIPCCLTLNFRAPPVIPNVPFLWAWNAPSEFCLGKFDEPLDMSLFSFIGSPRINATGQGVTIFYVDRLGYYPYIDSITGVTVNGGIPQKISLQDHLDKAKKDITFYMPVDNLGMAVIDWEEWRPTWARNWKPKDVYKNRSIELVQQQNVQLSLTEATEKAKQEFEKAGKDFLVETIKLGKLLRPNHLWGYYLFPDCYNHHYKKPGYNGSCFNVEIKRNDDLSWLWNESTALYPSIYLNTQQSPVAATLYVRNRVREAIRVSKIPDAKSPLPVFAYTRIVFTDQVLKFLSQDELVYTFGETVALGASGIVIWGTLSIMRSMKSCLLLDNYMETILNPYIINVTLAAKMCSQVLCQEQGVCIRKNWNSSDYLHLNPDNFAIQLEKGGKFTVRGKPTLEDLEQFSEKFYCSCYSTLSCKEKADVKDTDAVDVCIADGVCIDAFLKP

SEQ ID NO: 122 - protein, 470 aa, Homo sapiens
  precursor soluble human PH20, amino acid residues 1-470
  SIGNAL (1)...(35): signal sequence
MGVLKFKHIFFRSFVKSSGVSQIVFTFLLIPCCLTLNFRAPPVIPNVPFLWAWNAPSEFCLGKFDEPLDMSLFSFIGSPRINATGQGVTIFYVDRLGYYPYIDSITGVTVNGGIPQKISLQDHLDKAKKDITFYMPVDNLGMAVIDWEEWRPTWARNWKPKDVYKNRSIELVQQQNVQLSLTEATEKAKQEFEKAGKDFLVETIKLGKLLRPNHLWGYYLFPDCYNHHYKKPGYNGSCFNVEIKRNDDLSWLWNESTALYPSIYLNTQQSPVAATLYVRNRVREAIRVSKIPDAKSPLPVFAYTRIVFTDQVLKFLSQDELVYTFGETVALGASGIVIWGTLSIMRSMKSCLLLDNYMETILNPYIINVTLAAKMCSQVLCQEQGVCIRKNWNSSDYLHLNPDNFAIQLEKGGKFTVRGKPTLEDLEQFSEKFYCSCYSTLSCKEKADVKDTDAVDVCIADGVCIDAFLK

SEQ ID NO: 123 - protein, 469 aa, Homo sapiens
  precursor soluble human PH20, amino acid residues 1-469
  SIGNAL (1)...(35): signal sequence
MGVLKFKHIFFRSFVKSSGVSQIVFTFLLIPCCLTLNFRAPPVIPNVPFLWAWNAPSEFCLGKFDEPLDMSLFSFIGSPRINATGQGVTIFYVDRLGYYPYIDSITGVTVNGGIPQKISLQDHLDKAKKDITFYMPVDNLGMAVIDWEEWRPTWARNWKPKDVYKNRSIELVQQQNVQLSLTEATEKAKQEFEKAGKDFLVETIKLGKLLRPNHLWGYYLFPDCYNHHYKKPGYNGSCFNVEIKRNDDLSWLWNESTALYPSIYLNTQQSPVAATLYVRNRVREAIRVSKIPDAKSPLPVFAYTRIVFTDQVLKFLSQDELVYTFGETVALGASGIVIWGTLSIMRSMKSCLLLDNYMETILNPYIINVTLAAKMCSQVLCQEQGVCIRKNWNSSDYLHLNPDNFAIQLEKGGKFTVRGKPTLEDLEQFSEKFYCSCYSTLSCKEKADVKDTDAVDVCIADGVCIDAFL

SEQ ID NO: 124 - protein, 468 aa, Homo sapiens
  precursor soluble human PH20, amino acid residues 1-468
  SIGNAL (1)...(35): signal sequence
MGVLKFKHIFFRSFVKSSGVSQIVFTFLLIPCCLTLNFRAPPVIPNVPFLWAWNAPSEFCLGKFDEPLDMSLFSFIGSPRINATGQGVTIFYVDRLGYYPYIDSITGVTVNGGIPQKISLQDHLDKAKKDITFYMPVDNLGMAVIDWEEWRPTWARNWKPKDVYKNRSIELVQQQNVQLSLTEATEKAKQEFEKAGKDFLVETIKLGKLLRPNHLWGYYLFPDCYNHHYKKPGYNGSCFNVEIKRNDDLSWLWNESTALYPSIYLNTQQSPVAATLYVRNRVREAIRVSKIPDAKSPLPVFAYTRIVFTDQVLKFLSQDELVYTFGETVALGASGIVIWGTLSIMRSMKSCLLLDNYMETILNPYIINVTLAAKMCSQVLCQEQGVCIRKNWNSSDYLHLNPDNFAIQLEKGGKFTVRGKPTLEDLEQFSEKFYCSCYSTLSCKEKADVKDTDAVDVCIADGVCIDAF

SEQ ID NO: 125 - protein, 466 aa, Homo sapiens
  precursor soluble human PH20, amino acid residues 1-466
  SIGNAL (1)...(5): signal sequence
MGVLKFKHIFFRSFVKSSGVSQIVFTFLLIPCCLTLNFRAPPVIPNVPFLWAWNAPSEFCLGKFDEPLDMSLFSFIGSPRINATGQGVTIFYVDRLGYYPYIDSITGVTVNGGIPQKISLQDHLDKAKKDITFYMPVDNLGMAVIDWEEWRPTWARNWKPKDVYKNRSIELVQQQNVQLSLTEATEKAKQEFEKAGKDFLVETIKLGKLLRPNHLWGYYLFPDCYNHHYKKPGYNGSCFNVEIKRNDDLSWLWNESTALYPSIYLNTQQSPVAATLYVRNRVREAIRVSKIPDAKSPLPVFAYTRIVFTDQVLKFLSQDELVYTFGETVALGASGIVIWGTLSIMRSMKSCLLLDNYMETILNPYIINVTLAAKMCSQVLCQEQGVCIRKNWNSSDYLHLNPDNFAIQLEKGGKFTVRGKPTLEDLEQFSEKFYCSCYSTLSCKEKADVKDTDAVDVCIADGVCID

SEQ ID NO: 126 - protein, 465 aa, Homo sapiens
  precursor soluble human PH20, amino acid residues 1-465
  SIGNAL (1)...(35): signal sequence
MGVLKFKHIFFRSFVKSSGVSQIVFTFLLIPCCLTLNFRAPPVIPNVPFLWAWNAPSEFCLGKFDEPLDMSLFSFIGSPRINATGQGVTIFYVDRLGYYPYIDSITGVTVNGGIPQKISLQDHLDKAKKDITFYMPVDNLGMAVIDWEEWRPTWARNWKPKDVYKNRSIELVQQQNVQLSLTEATEKAKQEFEKAGKDFLVETIKLGKLLRPNHLWGYYLFPDCYNHHYKKPGYNGSCFNVEIKRNDDLSWLWNESTALYPSIYLNTQQSPVAATLYVRNRVREAIRVSKIPDAKSPLPVFAYTRIVFTDQVLKFLSQDELVYTFGETVALGASGIVIWGTLSIMRSMKSCLLLDNYMETILNPYIINVTLAAKMCSQVLCQEQGVCIRKNWNSSDYLHLNPDNFAIQLEKGGKFTVRGKPTLEDLEQFSEKFYCSCYSTLSCKEKADVKDTDAVDVCIADGVCI

SEQ ID NO: 127 - protein, 464 aa, Homo sapiens
  precursor soluble human PH20, amino acid residues 1-464
  SIGNAL (1)...(35): signal sequence
MGVLKFKHIFFRSFVKSSGVSQIVFTFLLIPCCLTLNFRAPPVIPNVPFLWAWNAPSEFCLGKFDEPLDMSLFSFIGSPRINATGQGVTIFYVDRLGYYPYIDSITGVTVNGGIPQKISLQDHLDKAKKDITFYMPVDNLGMAVIDWEEWRPTWARNWKPKDVYKNRSIELVQQQNVQLSLTEATEKAKQEFEKAGKDFLVETIKLGKLLRPNHLWGYYLFPDCYNHHYKKPGYNGSCFNVEIKRNDDLSWLWNESTALYPSIYLNTQQSPVAATLYVRNRVREAIRVSKIPDAKSPLPVFAYTRIVFTDQVLKFLSQDELVYTFGETVALGASGIVIWGTLSIMRSMKSCLLLDNYMETILNPYIINVTLAAKMCSQVLCQEQGVCIRKNWNSSDYLHLNPDNFAIQLEKGGKFTVRGKPTLEDLEQFSEKFYCSCYSTLSCKEKADVKDTDAVDVCIADGVC

SEQ ID NO: 128 - protein, 462 aa, Homo sapiens
  precursor soluble human PH20, amino acid residues 1-462
  SIGNAL (1)...(35): signal sequence
MGVLKFKHIFFRSFVKSSGVSQIVFTFLLIPCCLTLNFRAPPVIPNVPFLWAWNAPSEFCLGKFDEPLDMSLFSFIGSPRINATGQGVTIFYVDRLGYYPYIDSITGVTVNGGIPQKISLQDHLDKAKKDITFYMPVDNLGMAVIDWEEWRPTWARNWKPKDVYKNRSIELVQQQNVQLSLTEATEKAKQEFEKAGKDFLVETIKLGKLLRPNHLWGYYLFPDCYNHHYKKPGYNGSCFNVEIKRNDDLSWLWNESTALYPSIYLNTQQSPVAATLYVRNRVREAIRVSKIPDAKSPLPVFAYTRIVFTDQVLKFLSQDELVYTFGETVALGASGIVIWGTLSIMRSMKSCLLLDNYMETILNPYIINVTLAAKMCSQVLCQEQGVCIRKNWNSSDYLHLNPDNFAIQLEKGGKFTVRGKPTLEDLEQFSEKFYCSCYSTLSCKEKADVKDTDAVDVCIADG

SEQ ID NO: 129 - protein, 460 aa, Homo sapiens
  precursor soluble human PH20, amino acid residues 1-460
  SIGNAL (1)...(35): signal sequence
MGVLKFKHIFFRSFVKSSGVSQIVFTFLLIPCCLTLNFRAPPVIPNVPFLWAWNAPSEFCLGKFDEPLDMSLFSFIGSPRINATGQGVTIFYVDRLGYYPYIDSITGVTVNGGIPQKISLQDHLDKAKKDITFYMPVDNLGMAVIDWEEWRPTWARNWKPKDVYKNRSIELVQQQNVQLSLTEATEKAKQEFEKAGKDFLVETIKLGKLLRPNHLWGYYLFPDCYNHHYKKPGYNGSCFNVEIKRNDDLSWLWNESTALYPSIYLNTQQSPVAATLYVRNRVREAIRVSKIPDAKSPLPVFAYTRIVFTDQVLKFLSQDELVYTFGETVALGASGIVIWGTLSIMRSMKSCLLLDNYMETILNPYIINVTLAAKMCSQVLCQEQGVCIRKNWNSSDYLHLNPDNFAIQLEKGGKFTVRGKPTLEDLEQFSEKFYCSCYSTLSCKEKADVKDTDAVDVCIA

SEQ ID NO: 130 - protein, 458 aa, Homo sapiens
  precursor soluble human PH20, amino acid residues 1-458
  SIGNAL (1)...(35): signal sequence
MGVLKFKHIFFRSFVKSSGVSQIVFTFLLIPCCLTLNFRAPPVIPNVPFLWAWNAPSEFCLGKFDEPLDMSLFSFIGSPRINATGQGVTIFYVDRLGYYPYIDSITGVTVNGGIPQKISLQDHLDKAKKDITFYMPVDNLGMAVIDWEEWRPTWARNWKPKDVYKNRSIELVQQQNVQLSLTEATEKAKQEFEKAGKDFLVETIKLGKLLRPNHLWGYYLFPDCYNHHYKKPGYNGSCFNVEIKRNDDLSWLWNESTALYPSIYLNTQQSPVAATLYVRNRVREAIRVSKIPDAKSPLPVFAYTRIVFTDQVLKFLSQDELVYTFGETVALGASGIVIWGTLSIMRSMKSCLLLDNYMETILNPYIINVTLAAKMCSQVLCQEQGVCIRKNWNSSDYLHLNPDNFAIQLEKGGKFTVRGKPTLEDLEQFSEKFYCSCYSTLSCKEKADVKDTDAVDVC

SEQ ID NO: 131 - protein, 456 aa, Homo sapiens
  precursor soluble human PH20, amino acid residues 1-456
  SIGNAL (1)...(35): signal sequence
MGVLKFKHIFFRSFVKSSGVSQIVFTFLLIPCCLTLNFRAPPVIPNVPFLWAWNAPSEFCLGKFDEPLDMSLFSFIGSPRINATGQGVTIFYVDRLGYYPYIDSITGVTVNGGIPQKISLQDHLDKAKKDITFYMPVDNLGMAVIDWEEWRPTWARNWKPKDVYKNRSIELVQQQNVQLSLTEATEKAKQEFEKAGKDFLVETIKLGKLLRPNHLWGYYLFPDCYNHHYKKPGYNGSCFNVEIKRNDDLSWLWNESTALYPSIYLNTQQSPVAATLYVRNRVREAIRVSKIPDAKSPLPVFAYTRIVFTDQVLKFLSQDELVYTFGETVALGASGIVIWGTLSIMRSMKSCLLLDNYMETILNPYIINVTLAAKMCSQVLCQEQGVCIRKNWNSSDYLHLNPDNFAIQLEKGGKFTVRGKPTLEDLEQFSEKFYCSCYSTLSCKEKADVKDTDAVD

SEQ ID NO: 132 - protein, 454 aa, Homo sapiens
  precursor soluble human PH20, amino acid residues 1-454
  SIGNAL (1)...(35): signal sequence
MGVLKFKHIFFRSFVKSSGVSQIVFTFLLIPCCLTLNFRAPPVIPNVPFLWAWNAPSEFCLGKFDEPLDMSLFSFIGSPRINATGQGVTIFYVDRLGYYPYIDSITGVTVNGGIPQKISLQDHLDKAKKDITFYMPVDNLGMAVIDWEEWRPTWARNWKPKDVYKNRSIELVQQQNVQLSLTEATEKAKQEFEKAGKDFLVETIKLGKLLRPNHLWGYYLFPDCYNHHYKKPGYNGSCFNVEIKRNDDLSWLWNESTALYPSIYLNTQQSPVAATLYVRNRVREAIRVSKIPDAKSPLPVFAYTRIVFTDQVLKFLSQDELVYTFGETVALGASGIVIWGTLSIMRSMKSCLLLDNYMETILNPYIINVTLAAKMCSQVLCQEQGVCIRKNWNSSDYLHLNPDNFAIQLEKGGKFTVRGKPTLEDLEQFSEKFYCSCYSTLSCKEKADVKDTDA

SEQ ID NO: 133 - protein, 452 aa, Homo sapiens
  precursor soluble human PH20, amino acid residues 1-452
  SIGNAL (1)...(35): signal sequence
MGVLKFKHIFFRSFVKSSGVSQIVFTFLLIPCCLTLNFRAPPVIPNVPFLWAWNAPSEFCLGKFDEPLDMSLFSFIGSPRINATGQGVTIFYVDRLGYYPYIDSITGVTVNGGIPQKISLQDHLDKAKKDITFYMPVDNLGMAVIDWEEWRPTWARNWKPKDVYKNRSIELVQQQNVQLSLTEATEKAKQEFEKAGKDFLVETIKLGKLLRPNHLWGYYLFPDCYNHHYKKPGYNGSCFNVEIKRNDDLSWLWNESTALYPSIYLNTQQSPVAATLYVRNRVREAIRVSKIPDAKSPLPVFAYTRIVFTDQVLKFLSQDELVYTFGETVALGASGIVIWGTLSIMRSMKSCLLLDNYMETILNPYIINVTLAAKMCSQVLCQEQGVCIRKNWNSSDYLHLNPDNFAIQLEKGGKFTVRGKPTLEDLEQFSEKFYCSCYSTLSCKEKADVKDT

SEQ ID NO: 134 - protein, 450 aa, Homo sapiens
  precursor soluble human PH20, amino acid residues 1-450
  SIGNAL (1)...(35): signal sequence
MGVLKFKHIFFRSFVKSSGVSQIVFTFLLIPCCLTLNFRAPPVIPNVPFLWAWNAPSEFCLGKFDEPLDMSLFSFIGSPRINATGQGVTIFYVDRLGYYPYIDSITGVTVNGGIPQKISLQDHLDKAKKDITFYMPVDNLGMAVIDWEEWRPTWARNWKPKDVYKNRSIELVQQQNVQLSLTEATEKAKQEFEKAGKDFLVETIKLGKLLRPNHLWGYYLFPDCYNHHYKKPGYNGSCFNVEIKRNDDLSWLWNESTALYPSIYLNTQQSPVAATLYVRNRVREAIRVSKIPDAKSPLPVFAYTRIVFTDQVLKFLSQDELVYTFGETVALGASGIVIWGTLSIMRSMKSCLLLDNYMETILNPYIINVTLAAKMCSQVLCQEQGVCIRKNWNSSDYLHLNPDNFAIQLEKGGKFTVRGKPTLEDLEQFSEKFYCSCYSTLSCKEKADVK

SEQ ID NO: 135 - protein, 508 aa, Homo sapiens
  precursor soluble human PH20, amino acid residues 1-508
  SIGNAL (1)...(35): signal sequence
MGVLKFKHIFFRSFVKSSGVSQIVFTFLLIPCCLTLNFRAPPVIPNVPFLWAWNAPSEFCLGKFDEPLDMSLFSFIGSPRINATGQGVTIFYVDRLGYYPYIDSITGVTVNGGIPQKISLQDHLDKAKKDITFYMPVDNLGMAVIDWEEWRPTWARNWKPKDVYKNRSIELVQQQNVQLSLTEATEKAKQEFEKAGKDFLVETIKLGKLLRPNHLWGYYLFPDCYNHHYKKPGYNGSCFNVEIKRNDDLSWLWNESTALYPSIYLNTQQSPVAATLYVRNRVREAIRVSKIPDAKSPLPVFAYTRIVFTDQVLKFLSQDELVYTFGETVALGASGIVIWGTLSIMRSMKSCLLLDNYMETILNPYIINVTLAAKMCSQVLCQEQGVCIRKNWNSSDYLHLNPDNFAIQLEKGGKFTVRGKPTLEDLEQFSEKFYCSCYSTLSCKEKADVKDTDAVDVCIADGVCIDAFLKPPMETEEPQIFYNASPSTLSATMFIVSILFLIISSVAS

SEQ ID NO: 136 - protein, 506 aa, Homo sapiens
  precursor soluble human PH20, amino acid residues 1-506
  SIGNAL (1)...(35): signal sequence
MGVLKFKHIFFRSFVKSSGVSQIVFTFLLIPCCLTLNFRAPPVIPNVPFLWAWNAPSEFCLGKFDEPLDMSLFSFIGSPRINATGQGVTIFYVDRLGYYPYIDSITGVTVNGGIPQKISLQDHLDKAKKDITFYMPVDNLGMAVIDWEEWRPTWARNWKPKDVYKNRSIELVQQQNVQLSLTEATEKAKQEFEKAGKDFLVETIKLGKLLRPNHLWGYYLFPDCYNHHYKKPGYNGSCFNVEIKRNDDLSWLWNESTALYPSIYLNTQQSPVAATLYVRNRVREAIRVSKIPDAKSPLPVFAYTRIVFTDQVLKFLSQDELVYTFGETVALGASGIVIWGTLSIMRSMKSCLLLDNYMETILNPYIINVTLAAKMCSQVLCQEQGVCIRKNWNSSDYLHLNPDNFAIQLEKGGKFTVRGKPTLEDLEQFSEKFYCSCYSTLSCKEKADVKDTDAVDVCIADGVCIDAFLKPPMETEEPQIFYNASPSTLSATMFIVSILFLIISSV

SEQ ID NO: 137 - protein, 504 aa, Homo sapiens
  precursor soluble human PH20, amino acid residues 1-504
  SIGNAL (1)...(35): signal sequence
MGVLKFKHIFFRSFVKSSGVSQIVFTFLLIPCCLTLNFRAPPVIPNVPFLWAWNAPSEFCLGKFDEPLDMSLFSFIGSPRINATGQGVTIFYVDRLGYYPYIDSITGVTVNGGIPQKISLQDHLDKAKKDITFYMPVDNLGMAVIDWEEWRPTWARNWKPKDVYKNRSIELVQQQNVQLSLTEATEKAKQEFEKAGKDFLVETIKLGKLLRPNHLWGYYLFPDCYNHHYKKPGYNGSCFNVEIKRNDDLSWLWNESTALYPSIYLNTQQSPVAATLYVRNRVREAIRVSKIPDAKSPLPVFAYTRIVFTDQVLKFLSQDELVYTFGETVALGASGIVIWGTLSIMRSMKSCLLLDNYMETILNPYIINVTLAAKMCSQVLCQEQGVCIRKNWNSSDYLHLNPDNFAIQLEKGGKFTVRGKPTLEDLEQFSEKFYCSCYSTLSCKEKADVKDTDAVDVCIADGVCIDAFLKPPMETEEPQIFYNASPSTLSATMFIVSILFLIIS

SEQ ID NO: 138 - protein, 502 aa, Homo sapiens
  precursor soluble human PH20, amino acid residues 1-502
  SIGNAL (1)...(35): signal sequence
MGVLKFKHIFFRSFVKSSGVSQIVFTFLLIPCCLTLNFRAPPVIPNVPFLWAWNAPSEFCLGKFDEPLDMSLFSFIGSPRINATGQGVTIFYVDRLGYYPYIDSITGVTVNGGIPQKISLQDHLDKAKKDITFYMPVDNLGMAVIDWEEWRPTWARNWKPKDVYKNRSIELVQQQNVQLSLTEATEKAKQEFEKAGKDFLVETIKLGKLLRPNHLWGYYLFPDCYNHHYKKPGYNGSCFNVEIKRNDDLSWLWNESTALYPSIYLNTQQSPVAATLYVRNRVREAIRVSKIPDAKSPLPVFAYTRIVFTDQVLKFLSQDELVYTFGETVALGASGIVIWGTLSIMRSMKSCLLLDNYMETILNPYIINVTLAAKMCSQVLCQEQGVCIRKNWNSSDYLHLNPDNFAIQLEKGGKFTVRGKPTLEDLEQFSEKFYCSCYSTLSCKEKADVKDTDAVDVCIADGVCIDAFLKPPMETEEPQIFYNASPSTLSATMFIVSILFLI

SEQ ID NO: 139 - protein, 500 aa, Homo sapiens
  precursor soluble human PH20, amino acid residues 1-500
  SIGNAL (1)...(35): signal sequence
MGVLKFKHIFFRSFVKSSGVSQIVFTFLLIPCCLTLNFRAPPVIPNVPFLWAWNAPSEFCLGKFDEPLDMSLFSFIGSPRINATGQGVTIFYVDRLGYYPYIDSITGVTVNGGIPQKISLQDHLDKAKKDITFYMPVDNLGMAVIDWEEWRPTWARNWKPKDVYKNRSIELVQQQNVQLSLTEATEKAKQEFEKAGKDFLVETIKLGKLLRPNHLWGYYLFPDCYNHHYKKPGYNGSCFNVEIKRNDDLSWLWNESTALYPSIYLNTQQSPVAATLYVRNRVREAIRVSKIPDAKSPLPVFAYTRIVFTDQVLKFLSQDELVYTFGETVALGASGIVIWGTLSIMRSMKSCLLLDNYMETILNPYIINVTLAAKMCSQVLCQEQGVCIRKNWNSSDYLHLNPDNFAIQLEKGGKFTVRGKPTLEDLEQFSEKFYCSCYSTLSCKEKADVKDTDAVDVCIADGVCIDAFLKPPMETEEPQIFYNASPSTLSATMFIVSILF

SEQ ID NO: 140 - protein, 498 aa, Homo sapiens
  precursor soluble human PH20, amino acid residues 1-498
  SIGNAL (1)...(35): signal sequence
MGVLKFKHIFFRSFVKSSGVSQIVFTFLLIPCCLTLNFRAPPVIPNVPFLWAWNAPSEFCLGKFDEPLDMSLFSFIGSPRINATGQGVTIFYVDRLGYYPYIDSITGVTVNGGIPQKISLQDHLDKAKKDITFYMPVDNLGMAVIDWEEWRPTWARNWKPKDVYKNRSIELVQQQNVQLSLTEATEKAKQEFEKAGKDFLVETIKLGKLLRPNHLWGYYLFPDCYNHHYKKPGYNGSCFNVEIKRNDDLSWLWNESTALYPSIYLNTQQSPVAATLYVRNRVREAIRVSKIPDAKSPLPVFAYTRIVFTDQVLKFLSQDELVYTFGETVALGASGIVIWGTLSIMRSMKSCLLLDNYMETILNPYIINVTLAAKMCSQVLCQEQGVCIRKNWNSSDYLHLNPDNFAIQLEKGGKFTVRGKPTLEDLEQFSEKFYCSCYSTLSCKEKADVKDTDAVDVCIADGVCIDAFLKPPMETEEPQIFYNASPSTLSATMFIVSI

SEQ ID NO: 141 - protein, 496 aa, Homo sapiens
  precursor soluble human PH20, amino acid residues 1-496
  SIGNAL (1)...(35): signal sequence
MGVLKFKHIFFRSFVKSSGVSQIVFTFLLIPCCLTLNFRAPPVIPNVPFLWAWNAPSEFCLGKFDEPLDMSLFSFIGSPRINATGQGVTIFYVDRLGYYPYIDSITGVTVNGGIPQKISLQDHLDKAKKDITFYMPVDNLGMAVIDWEEWRPTWARNWKPKDVYKNRSIELVQQQNVQLSLTEATEKAKQEFEKAGKDFLVETIKLGKLLRPNHLWGYYLFPDCYNHHYKKPGYNGSCFNVEIKRNDDLSWLWNESTALYPSIYLNTQQSPVAATLYVRNRVREAIRVSKIPDAKSPLPVFAYTRIVFTDQVLKFLSQDELVYTFGETVALGASGIVIWGTLSIMRSMKSCLLLDNYMETILNPYIINVTLAAKMCSQVLCQEQGVCIRKNWNSSDYLHLNPDNFAIQLEKGGKFTVRGKPTLEDLEQFSEKFYCSCYSTLSCKEKADVKDTDAVDVCIADGVCIDAFLKPPMETEEPQIFYNASPSTLSATMFIV

SEQ ID NO: 142 - protein, 494 aa, Homo sapiens
  precursor soluble human PH20, amino acid residues 1-494
  SIGNAL (1)...(35): signal sequence
MGVLKFKHIFFRSFVKSSGVSQIVFTFLLIPCCLTLNFRAPPVIPNVPFLWAWNAPSEFCLGKFDEPLDMSLFSFIGSPRINATGQGVTIFYVDRLGYYPYIDSITGVTVNGGIPQKISLQDHLDKAKKDITFYMPVDNLGMAVIDWEEWRPTWARNWKPKDVYKNRSIELVQQQNVQLSLTEATEKAKQEFEKAGKDFLVETIKLGKLLRPNHLWGYYLFPDCYNHHYKKPGYNGSCFNVEIKRNDDLSWLWNESTALYPSIYLNTQQSPVAATLYVRNRVREAIRVSKIPDAKSPLPVFAYTRIVFTDQVLKFLSQDELVYTFGETVALGASGIVIWGTLSIMRSMKSCLLLDNYMETILNPYIINVTLAAKMCSQVLCQEQGVCIRKNWNSSDYLHLNPDNFAIQLEKGGKFTVRGKPTLEDLEQFSEKFYCSCYSTLSCKEKADVKDTDAVDVCIADGVCIDAFLKPPMETEEPQIFYNASPSTLSATMF

SEQ ID NO: 143 - protein, 492 aa, Homo sapiens
  precursor soluble human PH20, amino acid residues 1-492
  SIGNAL (1)...(35): signal sequence
MGVLKFKHIFFRSFVKSSGVSQIVFTFLLIPCCLTLNFRAPPVIPNVPFLWAWNAPSEFCLGKFDEPLDMSLFSFIGSPRINATGQGVTIFYVDRLGYYPYIDSITGVTVNGGIPQKISLQDHLDKAKKDITFYMPVDNLGMAVIDWEEWRPTWARNWKPKDVYKNRSIELVQQQNVQLSLTEATEKAKQEFEKAGKDFLVETIKLGKLLRPNHLWGYYLFPDCYNHHYKKPGYNGSCFNVEIKRNDDLSWLWNESTALYPSIYLNTQQSPVAATLYVRNRVREAIRVSKIPDAKSPLPVFAYTRIVFTDQVLKFLSQDELVYTFGETVALGASGIVIWGTLSIMRSMKSCLLLDNYMETILNPYIINVTLAAKMCSQVLCQEQGVCIRKNWNSSDYLHLNPDNFAIQLEKGGKFTVRGKPTLEDLEQFSEKFYCSCYSTLSCKEKADVKDTDAVDVCIADGVCIDAFLKPPMETEEPQIFYNASPSTLSAT

SEQ ID NO: 144 - protein, 488 aa, Homo sapiens
  precursor soluble human PH20, amino acid residues 1-488
  SIGNAL (1)...(35): signal sequence
MGVLKFKHIFFRSFVKSSGVSQIVFTFLLIPCCLTLNFRAPPVIPNVPFLWAWNAPSEFCLGKFDEPLDMSLFSFIGSPRINATGQGVTIFYVDRLGYYPYIDSITGVTVNGGIPQKISLQDHLDKAKKDITFYMPVDNLGMAVIDWEEWRPTWARNWKPKDVYKNRSIELVQQQNVQLSLTEATEKAKQEFEKAGKDFLVETIKLGKLLRPNHLWGYYLFPDCYNHHYKKPGYNGSCFNVEIKRNDDLSWLWNESTALYPSIYLNTQQSPVAATLYVRNRVREAIRVSKIPDAKSPLPVFAYTRIVFTDQVLKFLSQDELVYTFGETVALGASGIVIWGTLSIMRSMKSCLLLDNYMETILNPYIINVTLAAKMCSQVLCQEQGVCIRKNWNSSDYLHLNPDNFAIQLEKGGKFTVRGKPTLEDLEQFSEKFYCSCYSTLSCKEKADVKDTDAVDVCIADGVCIDAFLKPPMETEEPQIFYNASPST

SEQ ID NO: 145 - protein, 486 aa, Homo sapiens
  precursor soluble human PH20, amino acid residues 1-486
  SIGNAL (1)...(35): signal sequence
MGVLKFKHIFFRSFVKSSGVSQIVFTFLLIPCCLTLNFRAPPVIPNVPFLWAWNAPSEFCLGKFDEPLDMSLFSFIGSPRINATGQGVTIFYVDRLGYYPYIDSITGVTVNGGIPQKISLQDHLDKAKKDITFYMPVDNLGMAVIDWEEWRPTWARNWKPKDVYKNRSIELVQQQNVQLSLTEATEKAKQEFEKAGKDFLVETIKLGKLLRPNHLWGYYLFPDCYNHHYKKPGYNGSCFNVEIKRNDDLSWLWNESTALYPSIYLNTQQSPVAATLYVRNRVREAIRVSKIPDAKSPLPVFAYTRIVFTDQVLKFLSQDELVYTFGETVALGASGIVIWGTLSIMRSMKSCLLLDNYMETILNPYIINVTLAAKMCSQVLCQEQGVCIRKNWNSSDYLHLNPDNFAIQLEKGGKFTVRGKPTLEDLEQFSEKFYCSCYSTLSCKEKADVKDTDAVDVCIADGVCIDAFLKPPMETEEPQIFYNASP

SEQ ID NO: 146 - protein, 472 aa, Homo sapiens
  mature soluble human PH20, amino acid residues 36-507
LNFRAPPVIPNVPFLWAWNAPSEFCLGKFDEPLDMSLFSFIGSPRINATGQGVTIFYVDRLGYYPYIDSITGVTVNGGIPQKISLQDHLDKAKKDITFYMPVDNLGMAVIDWEEWRPTWARNWKPKDVYKNRSIELVQQQNVQLSLTEATEKAKQEFEKAGKDFLVETIKLGKLLRPNHLWGYYLFPDCYNHHYKKPGYNGSCFNVEIKRNDDLSWLWNESTALYPSIYLNTQQSPVAATLYVRNRVREAIRVSKIPDAKSPLPVFAYTRIVFTDQVLKFLSQDELVYTFGETVALGASGIVIWGTLSIMRSMKSCLLLDNYMETILNPYIINVTLAAKMCSQVLCQEQGVCIRKNWNSSDYLHLNPDNFAIQLEKGGKFTVRGKPTLEDLEQFSEKFYCSCYSTLSCKEKADVKDTDAVDVCIADGVCIDAFLKPPMETEEPQIFYNASPSTLSATMFIVSILFLIISSVA

SEQ ID NO: 147 - protein, 470 aa, Homo sapiens
  mature soluble human PH20, amino acid residues 36-505
LNFRAPPVIPNVPFLWAWNAPSEFCLGKFDEPLDMSLFSFIGSPRINATGQGVTIFYVDRLGYYPYIDSITGVTVNGGIPQKISLQDHLDKAKKDITFYMPVDNLGMAVIDWEEWRPTWARNWKPKDVYKNRSIELVQQQNVQLSLTEATEKAKQEFEKAGKDFLVETIKLGKLLRPNHLWGYYLFPDCYNHHYKKPGYNGSCFNVEIKRNDDLSWLWNESTALYPSIYLNTQQSPVAATLYVRNRVREAIRVSKIPDAKSPLPVFAYTRIVFTDQVLKFLSQDELVYTFGETVALGASGIVIWGTLSIMRSMKSCLLLDNYMETILNPYIINVTLAAKMCSQVLCQEQGVCIRKNWNSSDYLHLNPDNFAIQLEKGGKFTVRGKPTLEDLEQFSEKFYCSCYSTLSCKEKADVKDTDAVDVCIADGVCIDAFLKPPMETEEPQIFYNASPSTLSATMFIVSILFLIISS

SEQ ID NO: 148 - protein, 468 aa, Homo sapiens
  mature soluble human PH20, amino acid residues 36-503
LNFRAPPVIPNVPFLWAWNAPSEFCLGKFDEPLDMSLFSFIGSPRINATGQGVTIFYVDRLGYYPYIDSITGVTVNGGIPQKISLQDHLDKAKKDITFYMPVDNLGMAVIDWEEWRPTWARNWKPKDVYKNRSIELVQQQNVQLSLTEATEKAKQEFEKAGKDFLVETIKLGKLLRPNHLWGYYLFPDCYNHHYKKPGYNGSCFNVEIKRNDDLSWLWNESTALYPSIYLNTQQSPVAATLYVRNRVREAIRVSKIPDAKSPLPVFAYTRIVFTDQVLKFLSQDELVYTFGETVALGASGIVIWGTLSIMRSMKSCLLLDNYMETILNPYIINVTLAAKMCSQVLCQEQGVCIRKNWNSSDYLHLNPDNFAIQLEKGGKFTVRGKPTLEDLEQFSEKFYCSCYSTLSCKEKADVKDTDAVDVCIADGVCIDAFLKPPMETEEPQIFYNASPSTLSATMFIVSILFLII

SEQ ID NO: 149 - protein, 466 aa, Homo sapiens
  mature soluble human PH20, amino acid residues 36-501
LNFRAPPVIPNVPFLWAWNAPSEFCLGKFDEPLDMSLFSFIGSPRINATGQGVTIFYVDRLGYYPYIDSITGVTVNGGIPQKISLQDHLDKAKKDITFYMPVDNLGMAVIDWEEWRPTWARNWKPKDVYKNRSIELVQQQNVQLSLTEATEKAKQEFEKAGKDFLVETIKLGKLLRPNHLWGYYLFPDCYNHHYKKPGYNGSCFNVEIKRNDDLSWLWNESTALYPSIYLNTQQSPVAATLYVRNRVREAIRVSKIPDAKSPLPVFAYTRIVFTDQVLKFLSQDELVYTFGETVALGASGIVIWGTLSIMRSMKSCLLLDNYMETILNPYIINVTLAAKMCSQVLCQEQGVCIRKNWNSSDYLHLNPDNFAIQLEKGGKFTVRGKPTLEDLEQFSEKFYCSCYSTLSCKEKADVKDTDAVDVCIADGVCIDAFLKPPMETEEPQIFYNASPSTLSATMFIVSILFL

SEQ ID NO: 150 - protein, 464 aa, Homo sapiens
  mature soluble human PH20, amino acid residues 36-499
LNFRAPPVIPNVPFLWAWNAPSEFCLGKFDEPLDMSLFSFIGSPRINATGQGVTIFYVDRLGYYPYIDSITGVTVNGGIPQKISLQDHLDKAKKDITFYMPVDNLGMAVIDWEEWRPTWARNWKPKDVYKNRSIELVQQQNVQLSLTEATEKAKQEFEKAGKDFLVETIKLGKLLRPNHLWGYYLFPDCYNHHYKKPGYNGSCFNVEIKRNDDLSWLWNESTALYPSIYLNTQQSPVAATLYVRNRVREAIRVSKIPDAKSPLPVFAYTRIVFTDQVLKFLSQDELVYTFGETVALGASGIVIWGTLSIMRSMKSCLLLDNYMETILNPYIINVTLAAKMCSQVLCQEQGVCIRKNWNSSDYLHLNPDNFAIQLEKGGKFTVRGKPTLEDLEQFSEKFYCSCYSTLSCKEKADVKDTDAVDVCIADGVCIDAFLKPPMETEEPQIFYNASPSTLSATMFIVSIL

SEQ ID NO: 151 - protein, 462 aa, Homo sapiens
  mature soluble human PH20, amino acid residues 36-497
LNFRAPPVIPNVPFLWAWNAPSEFCLGKFDEPLDMSLFSFIGSPRINATGQGVTIFYVDRLGYYPYIDSITGVTVNGGIPQKISLQDHLDKAKKDITFYMPVDNLGMAVIDWEEWRPTWARNWKPKDVYKNRSIELVQQQNVQLSLTEATEKAKQEFEKAGKDFLVETIKLGKLLRPNHLWGYYLFPDCYNHHYKKPGYNGSCFNVEIKRNDDLSWLWNESTALYPSIYLNTQQSPVAATLYVRNRVREAIRVSKIPDAKSPLPVFAYTRIVFTDQVLKFLSQDELVYTFGETVALGASGIVIWGTLSIMRSMKSCLLLDNYMETILNPYIINVTLAAKMCSQVLCQEQGVCIRKNWNSSDYLHLNPDNFAIQLEKGGKFTVRGKPTLEDLEQFSEKFYCSCYSTLSCKEKADVKDTDAVDVCIADGVCIDAFLKPPMETEEPQIFYNASPSTLSATMFIVS

SEQ ID NO: 152 - protein, 460 aa, Homo sapiens
  mature soluble human PH20, amino acid residues 36-495
LNFRAPPVIPNVPFLWAWNAPSEFCLGKFDEPLDMSLFSFIGSPRINATGQGVTIFYVDRLGYYPYIDSITGVTVNGGIPQKISLQDHLDKAKKDITFYMPVDNLGMAVIDWEEWRPTWARNWKPKDVYKNRSIELVQQQNVQLSLTEATEKAKQEFEKAGKDFLVETIKLGKLLRPNHLWGYYLFPDCYNHHYKKPGYNGSCFNVEIKRNDDLSWLWNESTALYPSIYLNTQQSPVAATLYVRNRVREAIRVSKIPDAKSPLPVFAYTRIVFTDQVLKFLSQDELVYTFGETVALGASGIVIWGTLSIMRSMKSCLLLDNYMETILNPYIINVTLAAKMCSQVLCQEQGVCIRKNWNSSDYLHLNPDNFAIQLEKGGKFTVRGKPTLEDLEQFSEKFYCSCYSTLSCKEKADVKDTDAVDVCIADGVCIDAFLKPPMETEEPQIFYNASPSTLSATMFI

SEQ ID NO: 153 - protein, 458 aa, Homo sapiens
  mature soluble human PH20, amino acid residues 36-493
LNFRAPPVIPNVPFLWAWNAPSEFCLGKFDEPLDMSLFSFIGSPRINATGQGVTIFYVDRLGYYPYIDSITGVTVNGGIPQKISLQDHLDKAKKDITFYMPVDNLGMAVIDWEEWRPTWARNWKPKDVYKNRSIELVQQQNVQLSLTEATEKAKQEFEKAGKDFLVETIKLGKLLRPNHLWGYYLFPDCYNHHYKKPGYNGSCFNVEIKRNDDLSWLWNESTALYPSIYLNTQQSPVAATLYVRNRVREAIRVSKIPDAKSPLPVFAYTRIVFTDQVLKFLSQDELVYTFGETVALGASGIVIWGTLSIMRSMKSCLLLDNYMETILNPYIINVTLAAKMCSQVLCQEQGVCIRKNWNSSDYLHLNPDNFAIQLEKGGKFTVRGKPTLEDLEQFSEKFYCSCYSTLSCKEKADVKDTDAVDVCIADGVCIDAFLKPPMETEEPQIFYNASPSTLSATM

SEQ ID NO: 154 - protein, 456 aa, Homo sapiens
  mature soluble human PH20, amino acid residues 36-491
LNFRAPPVIPNVPFLWAWNAPSEFCLGKFDEPLDMSLFSFIGSPRINATGQGVTIFYVDRLGYYPYIDSITGVTVNGGIPQKISLQDHLDKAKKDITFYMPVDNLGMAVIDWEEWRPTWARNWKPKDVYKNRSIELVQQQNVQLSLTEATEKAKQEFEKAGKDFLVETIKLGKLLRPNHLWGYYLFPDCYNHHYKKPGYNGSCFNVEIKRNDDLSWLWNESTALYPSIYLNTQQSPVAATLYVRNRVREAIRVSKIPDAKSPLPVFAYTRIVFTDQVLKFLSQDELVYTFGETVALGASGIVIWGTLSIMRSMKSCLLLDNYMETILNPYIINVTLAAKMCSQVLCQEQGVCIRKNWNSSDYLHLNPDNFAIQLEKGGKFTVRGKPTLEDLEQFSEKFYCSCYSTLSCKEKADVKDTDAVDVCIADGVCIDAFLKPPMETEEPQIFYNASPSTLSA

SEQ ID NO: 155 - protein, 454 aa, Homo sapiens
  mature soluble human PH20, amino acid residues 36-489
LNFRAPPVIPNVPFLWAWNAPSEFCLGKFDEPLDMSLFSFIGSPRINATGQGVTIFYVDRLGYYPYIDSITGVTVNGGIPQKISLQDHLDKAKKDITFYMPVDNLGMAVIDWEEWRPTWARNWKPKDVYKNRSIELVQQQNVQLSLTEATEKAKQEFEKAGKDFLVETIKLGKLLRPNHLWGYYLFPDCYNHHYKKPGYNGSCFNVEIKRNDDLSWLWNESTALYPSIYLNTQQSPVAATLYVRNRVREAIRVSKIPDAKSPLPVFAYTRIVFTDQVLKFLSQDELVYTFGETVALGASGIVIWGTLSIMRSMKSCLLLDNYMETILNPYIINVTLAAKMCSQVLCQEQGVCIRKNWNSSDYLHLNPDNFAIQLEKGGKFTVRGKPTLEDLEQFSEKFYCSCYSTLSCKEKADVKDTDAVDVCIADGVCIDAFLKPPMETEEPQIFYNASPSTL

SEQ ID NO: 156 - protein, 455 aa, Homo sapiens
  mature soluble human PH20, amino acid residues 36-490
LNFRAPPVIPNVPFLWAWNAPSEFCLGKFDEPLDMSLFSFIGSPRINATGQGVTIFYVDRLGYYPYIDSITGVTVNGGIPQKISLQDHLDKAKKDITFYMPVDNLGMAVIDWEEWRPTWARNWKPKDVYKNRSIELVQQQNVQLSLTEATEKAKQEFEKAGKDFLVETIKLGKLLRPNHLWGYYLFPDCYNHHYKKPGYNGSCFNVEIKRNDDLSWLWNESTALYPSIYLNTQQSPVAATLYVRNRVREAIRVSKIPDAKSPLPVFAYTRIVFTDQVLKFLSQDELVYTFGETVALGASGIVIWGTLSIMRSMKSCLLLDNYMETILNPYIINVTLAAKMCSQVLCQEQGVCIRKNWNSSDYLHLNPDNFAIQLEKGGKFTVRGKPTLEDLEQFSEKFYCSCYSTLSCKEKADVKDTDAVDVCIADGVCIDAFLKPPMETEEPQIFYNASPSTLS

SEQ ID NO: 157 - protein, 452 aa, Homo sapiens
  mature soluble human PH20, amino acid residues 36-487
LNFRAPPVIPNVPFLWAWNAPSEFCLGKFDEPLDMSLFSFIGSPRINATGQGVTIFYVDRLGYYPYIDSITGVTVNGGIPQKISLQDHLDKAKKDITFYMPVDNLGMAVIDWEEWRPTWARNWKPKDVYKNRSIELVQQQNVQLSLTEATEKAKQEFEKAGKDFLVETIKLGKLLRPNHLWGYYLFPDCYNHHYKKPGYNGSCFNVEIKRNDDLSWLWNESTALYPSIYLNTQQSPVAATLYVRNRVREAIRVSKIPDAKSPLPVFAYTRIVFTDQVLKFLSQDELVYTFGETVALGASGIVIWGTLSIMRSMKSCLLLDNYMETILNPYIINVTLAAKMCSQVLCQEQGVCIRKNWNSSDYLHLNPDNFAIQLEKGGKFTVRGKPTLEDLEQFSEKFYCSCYSTLSCKEKADVKDTDAVDVCIADGVCIDAFLKPPMETEEPQIFYNASPS

SEQ ID NO: 158 - protein, 450 aa, Homo sapiens
  mature soluble human PH20, amino acid residues 36-485
LNFRAPPVIPNVPFLWAWNAPSEFCLGKFDEPLDMSLFSFIGSPRINATGQGVTIFYVDRLGYYPYIDSITGVTVNGGIPQKISLQDHLDKAKKDITFYMPVDNLGMAVIDWEEWRPTWARNWKPKDVYKNRSIELVQQQNVQLSLTEATEKAKQEFEKAGKDFLVETIKLGKLLRPNHLWGYYLFPDCYNHHYKKPGYNGSCFNVEIKRNDDLSWLWNESTALYPSIYLNTQQSPVAATLYVRNRVREAIRVSKIPDAKSPLPVFAYTRIVFTDQVLKFLSQDELVYTFGETVALGASGIVIWGTLSIMRSMKSCLLLDNYMETILNPYIINVTLAAKMCSQVLCQEQGVCIRKNWNSSDYLHLNPDNFAIQLEKGGKFTVRGKPTLEDLEQFSEKFYCSCYSTLSCKEKADVKDTDAVDVCIADGVCIDAFLKPPMETEEPQIFYNAS

SEQ ID NO: 159 - protein, 449 aa, Homo sapiens
  mature soluble human PH20, amino acid residues 36-484
LNFRAPPVIPNVPFLWAWNAPSEFCLGKFDEPLDMSLFSFIGSPRINATGQGVTIFYVDRLGYYPYIDSITGVTVNGGIPQKISLQDHLDKAKKDITFYMPVDNLGMAVIDWEEWRPTWARNWKPKDVYKNRSIELVQQQNVQLSLTEATEKAKQEFEKAGKDFLVETIKLGKLLRPNHLWGYYLFPDCYNHHYKKPGYNGSCFNVEIKRNDDLSWLWNESTALYPSIYLNTQQSPVAATLYVRNRVREAIRVSKIPDAKSPLPVFAYTRIVFTDQVLKFLSQDELVYTFGETVALGASGIVIWGTLSIMRSMKSCLLLDNYMETILNPYIINVTLAAKMCSQVLCQEQGVCIRKNWNSSDYLHLNPDNFAIQLEKGGKFTVRGKPTLEDLEQFSEKFYCSCYSTLSCKEKADVKDTDAVDVCIADGVCIDAFLKPPMETEEPQIFYNA

SEQ ID NO: 160 - protein, 441 aa, Homo sapiens
  mature soluble human PH20, amino acid residues 36-476
LNFRAPPVIPNVPFLWAWNAPSEFCLGKFDEPLDMSLFSFIGSPRINATGQGVTIFYVDRLGYYPYIDSITGVTVNGGIPQKISLQDHLDKAKKDITFYMPVDNLGMAVIDWEEWRPTWARNWKPKDVYKNRSIELVQQQNVQLSLTEATEKAKQEFEKAGKDFLVETIKLGKLLRPNHLWGYYLFPDCYNHHYKKPGYNGSCFNVEIKRNDDLSWLWNESTALYPSIYLNTQQSPVAATLYVRNRVREAIRVSKIPDAKSPLPVFAYTRIVFTDQVLKFLSQDELVYTFGETVALGASGIVIWGTLSIMRSMKSCLLLDNYMETILNPYIINVTLAAKMCSQVLCQEQGVCIRKNWNSSDYLHLNPDNFAIQLEKGGKFTVRGKPTLEDLEQFSEKFYCSCYSTLSCKEKADVKDTDAVDVCIADGVCIDAFLKPPMETE

SEQ ID NO: 161 - protein, 440 aa, Homo sapiens
  mature soluble human PH20, amino acid residues 36-475
LNFRAPPVIPNVPFLWAWNAPSEFCLGKFDEPLDMSLFSFIGSPRINATGQGVTIFYVDRLGYYPYIDSITGVTVNGGIPQKISLQDHLDKAKKDITFYMPVDNLGMAVIDWEEWRPTWARNWKPKDVYKNRSIELVQQQNVQLSLTEATEKAKQEFEKAGKDFLVETIKLGKLLRPNHLWGYYLFPDCYNHHYKKPGYNGSCFNVEIKRNDDLSWLWNESTALYPSIYLNTQQSPVAATLYVRNRVREAIRVSKIPDAKSPLPVFAYTRIVFTDQVLKFLSQDELVYTFGETVALGASGIVIWGTLSIMRSMKSCLLLDNYMETILNPYIINVTLAAKMCSQVLCQEQGVCIRKNWNSSDYLHLNPDNFAIQLEKGGKFTVRGKPTLEDLEQFSEKFYCSCYSTLSCKEKADVKDTDAVDVCIADGVCIDAFLKPPMET

SEQ ID NO: 162 - protein, 439 aa, Homo sapiens
  mature soluble human PH20, amino acid residues 36-474
LNFRAPPVIPNVPFLWAWNAPSEFCLGKFDEPLDMSLFSFIGSPRINATGQGVTIFYVDRLGYYPYIDSITGVTVNGGIPQKISLQDHLDKAKKDITFYMPVDNLGMAVIDWEEWRPTWARNWKPKDVYKNRSIELVQQQNVQLSLTEATEKAKQEFEKAGKDFLVETIKLGKLLRPNHLWGYYLFPDCYNHHYKKPGYNGSCFNVEIKRNDDLSWLWNESTALYPSIYLNTQQSPVAATLYVRNRVREAIRVSKIPDAKSPLPVFAYTRIVFTDQVLKFLSQDELVYTFGETVALGASGIVIWGTLSIMRSMKSCLLLDNYMETILNPYIINVTLAAKMCSQVLCQEQGVCIRKNWNSSDYLHLNPDNFAIQLEKGGKFTVRGKPTLEDLEQFSEKFYCSCYSTLSCKEKADVKDTDAVDVCIADGVCIDAFLKPPME

SEQ ID NO: 163 - protein, 438 aa, Homo sapiens
  mature soluble human PH20, amino acid residues 36-473
LNFRAPPVIPNVPFLWAWNAPSEFCLGKFDEPLDMSLFSFIGSPRINATGQGVTIFYVDRLGYYPYIDSITGVTVNGGIPQKISLQDHLDKAKKDITFYMPVDNLGMAVIDWEEWRPTWARNWKPKDVYKNRSIELVQQQNVQLSLTEATEKAKQEFEKAGKDFLVETIKLGKLLRPNHLWGYYLFPDCYNHHYKKPGYNGSCFNVEIKRNDDLSWLWNESTALYPSIYLNTQQSPVAATLYVRNRVREAIRVSKIPDAKSPLPVFAYTRIVFTDQVLKFLSQDELVYTFGETVALGASGIVIWGTLSIMRSMKSCLLLDNYMETILNPYIINVTLAAKMCSQVLCQEQGVCIRKNWNSSDYLHLNPDNFAIQLEKGGKFTVRGKPTLEDLEQFSEKFYCSCYSTLSCKEKADVKDTDAVDVCIADGVCIDAFLKPPM

SEQ ID NO: 164 - protein, 437 aa, Homo sapiens
  mature soluble human PH20, amino acid residues 36-472
LNFRAPPVIPNVPFLWAWNAPSEFCLGKFDEPLDMSLFSFIGSPRINATGQGVTIFYVDRLGYYPYIDSITGVTVNGGIPQKISLQDHLDKAKKDITFYMPVDNLGMAVIDWEEWRPTWARNWKPKDVYKNRSIELVQQQNVQLSLTEATEKAKQEFEKAGKDFLVETIKLGKLLRPNHLWGYYLFPDCYNHHYKKPGYNGSCFNVEIKRNDDLSWLWNESTALYPSIYLNTQQSPVAATLYVRNRVREAIRVSKIPDAKSPLPVFAYTRIVFTDQVLKFLSQDELVYTFGETVALGASGIVIWGTLSIMRSMKSCLLLDNYMETILNPYIINVTLAAKMCSQVLCQEQGVCIRKNWNSSDYLHLNPDNFAIQLEKGGKFTVRGKPTLEDLEQFSEKFYCSCYSTLSCKEKADVKDTDAVDVCIADGVCIDAFLKPP

SEQ ID NO: 165 - protein, 436 aa, Homo sapiens
  mature soluble human PH20, amino acid residues 36-471
LNFRAPPVIPNVPFLWAWNAPSEFCLGKFDEPLDMSLFSFIGSPRINATGQGVTIFYVDRLGYYPYIDSITGVTVNGGIPQKISLQDHLDKAKKDITFYMPVDNLGMAVIDWEEWRPTWARNWKPKDVYKNRSIELVQQQNVQLSLTEATEKAKQEFEKAGKDFLVETIKLGKLLRPNHLWGYYLFPDCYNHHYKKPGYNGSCFNVEIKRNDDLSWLWNESTALYPSIYLNTQQSPVAATLYVRNRVREAIRVSKIPDAKSPLPVFAYTRIVFTDQVLKFLSQDELVYTFGETVALGASGIVIWGTLSIMRSMKSCLLLDNYMETILNPYIINVTLAAKMCSQVLCQEQGVCIRKNWNSSDYLHLNPDNFAIQLEKGGKFTVRGKPTLEDLEQFSEKFYCSCYSTLSCKEKADVKDTDAVDVCIADGVCIDAFLKP

SEQ ID NO: 166 - protein, 435 aa, Homo sapiens
  mature soluble human PH20, amino acid residues 36-470
LNFRAPPVIPNVPFLWAWNAPSEFCLGKFDEPLDMSLFSFIGSPRINATGQGVTIFYVDRLGYYPYIDSITGVTVNGGIPQKISLQDHLDKAKKDITFYMPVDNLGMAVIDWEEWRPTWARNWKPKDVYKNRSIELVQQQNVQLSLTEATEKAKQEFEKAGKDFLVETIKLGKLLRPNHLWGYYLFPDCYNHHYKKPGYNGSCFNVEIKRNDDLSWLWNESTALYPSIYLNTQQSPVAATLYVRNRVREAIRVSKIPDAKSPLPVFAYTRIVFTDQVLKFLSQDELVYTFGETVALGASGIVIWGTLSIMRSMKSCLLLDNYMETILNPYIINVTLAAKMCSQVLCQEQGVCIRKNWNSSDYLHLNPDNFAIQLEKGGKFTVRGKPTLEDLEQFSEKFYCSCYSTLSCKEKADVKDTDAVDVCIADGVCIDAFLK

SEQ ID NO: 167 - protein, 434 aa, Homo sapiens
  mature soluble human PH20, amino acid residues 36-469
LNFRAPPVIPNVPFLWAWNAPSEFCLGKFDEPLDMSLFSFIGSPRINATGQGVTIFYVDRLGYYPYIDSITGVTVNGGIPQKISLQDHLDKAKKDITFYMPVDNLGMAVIDWEEWRPTWARNWKPKDVYKNRSIELVQQQNVQLSLTEATEKAKQEFEKAGKDFLVETIKLGKLLRPNHLWGYYLFPDCYNHHYKKPGYNGSCFNVEIKRNDDLSWLWNESTALYPSIYLNTQQSPVAATLYVRNRVREAIRVSKIPDAKSPLPVFAYTRIVFTDQVLKFLSQDELVYTFGETVALGASGIVIWGTLSIMRSMKSCLLLDNYMETILNPYIINVTLAAKMCSQVLCQEQGVCIRKNWNSSDYLHLNPDNFAIQLEKGGKFTVRGKPTLEDLEQFSEKFYCSCYSTLSCKEKADVKDTDAVDVCIADGVCIDAFL

SEQ ID NO: 168 - protein, 433 aa, Homo sapiens
  mature soluble human PH20, amino acid residues 36-468
LNFRAPPVIPNVPFLWAWNAPSEFCLGKFDEPLDMSLFSFIGSPRINATGQGVTIFYVDRLGYYPYIDSITGVTVNGGIPQKISLQDHLDKAKKDITFYMPVDNLGMAVIDWEEWRPTWARNWKPKDVYKNRSIELVQQQNVQLSLTEATEKAKQEFEKAGKDFLVETIKLGKLLRPNHLWGYYLFPDCYNHHYKKPGYNGSCFNVEIKRNDDLSWLWNESTALYPSIYLNTQQSPVAATLYVRNRVREAIRVSKIPDAKSPLPVFAYTRIVFTDQVLKFLSQDELVYTFGETVALGASGIVIWGTLSIMRSMKSCLLLDNYMETILNPYIINVTLAAKMCSQVLCQEQGVCIRKNWNSSDYLHLNPDNFAIQLEKGGKFTVRGKPTLEDLEQFSEKFYCSCYSTLSCKEKADVKDTDAVDVCIADGVCIDAF

SEQ ID NO: 169 - protein, 431 aa, Homo sapiens
  mature soluble human PH20, amino acid residues 36-466
LNFRAPPVIPNVPFLWAWNAPSEFCLGKFDEPLDMSLFSFIGSPRINATGQGVTIFYVDRLGYYPYIDSITGVTVNGGIPQKISLQDHLDKAKKDITFYMPVDNLGMAVIDWEEWRPTWARNWKPKDVYKNRSIELVQQQNVQLSLTEATEKAKQEFEKAGKDFLVETIKLGKLLRPNHLWGYYLFPDCYNHHYKKPGYNGSCFNVEIKRNDDLSWLWNESTALYPSIYLNTQQSPVAATLYVRNRVREAIRVSKIPDAKSPLPVFAYTRIVFTDQVLKFLSQDELVYTFGETVALGASGIVIWGTLSIMRSMKSCLLLDNYMETILNPYIINVTLAAKMCSQVLCQEQGVCIRKNWNSSDYLHLNPDNFAIQLEKGGKFTVRGKPTLEDLEQFSEKFYCSCYSTLSCKEKADVKDTDAVDVCIADGVCID

SEQ ID NO: 170 - protein, 430 aa, Homo sapiens
  mature soluble human PH20, amino acid residues 36-465
LNFRAPPVIPNVPFLWAWNAPSEFCLGKFDEPLDMSLFSFIGSPRINATGQGVTIFYVDRLGYYPYIDSITGVTVNGGIPQKISLQDHLDKAKKDITFYMPVDNLGMAVIDWEEWRPTWARNWKPKDVYKNRSIELVQQQNVQLSLTEATEKAKQEFEKAGKDFLVETIKLGKLLRPNHLWGYYLFPDCYNHHYKKPGYNGSCFNVEIKRNDDLSWLWNESTALYPSIYLNTQQSPVAATLYVRNRVREAIRVSKIPDAKSPLPVFAYTRIVFTDQVLKFLSQDELVYTFGETVALGASGIVIWGTLSIMRSMKSCLLLDNYMETILNPYIINVTLAAKMCSQVLCQEQGVCIRKNWNSSDYLHLNPDNFAIQLEKGGKFTVRGKPTLEDLEQFSEKFYCSCYSTLSCKEKADVKDTDAVDVCIADGVCI

SEQ ID NO: 171 - protein, 429 aa, Homo sapiens
  mature soluble human PH20, amino acid residues 36-464
LNFRAPPVIPNVPFLWAWNAPSEFCLGKFDEPLDMSLFSFIGSPRINATGQGVTIFYVDRLGYYPYIDSITGVTVNGGIPQKISLQDHLDKAKKDITFYMPVDNLGMAVIDWEEWRPTWARNWKPKDVYKNRSIELVQQQNVQLSLTEATEKAKQEFEKAGKDFLVETIKLGKLLRPNHLWGYYLFPDCYNHHYKKPGYNGSCFNVEIKRNDDLSWLWNESTALYPSIYLNTQQSPVAATLYVRNRVREAIRVSKIPDAKSPLPVFAYTRIVFTDQVLKFLSQDELVYTFGETVALGASGIVIWGTLSIMRSMKSCLLLDNYMETILNPYIINVTLAAKMCSQVLCQEQGVCIRKNWNSSDYLHLNPDNFAIQLEKGGKFTVRGKPTLEDLEQFSEKFYCSCYSTLSCKEKADVKDTDAVDVCIADGVC

SEQ ID NO: 172 - protein, 427 aa, Homo sapiens
  mature soluble human PH20, amino acid residues 36-462
LNFRAPPVIPNVPFLWAWNAPSEFCLGKFDEPLDMSLFSFIGSPRINATGQGVTIFYVDRLGYYPYIDSITGVTVNGGIPQKISLQDHLDKAKKDITFYMPVDNLGMAVIDWEEWRPTWARNWKPKDVYKNRSIELVQQQNVQLSLTEATEKAKQEFEKAGKDFLVETIKLGKLLRPNHLWGYYLFPDCYNHHYKKPGYNGSCFNVEIKRNDDLSWLWNESTALYPSIYLNTQQSPVAATLYVRNRVREAIRVSKIPDAKSPLPVFAYTRIVFTDQVLKFLSQDELVYTFGETVALGASGIVIWGTLSIMRSMKSCLLLDNYMETILNPYIINVTLAAKMCSQVLCQEQGVCIRKNWNSSDYLHLNPDNFAIQLEKGGKFTVRGKPTLEDLEQFSEKFYCSCYSTLSCKEKADVKDTDAVDVCIADG

SEQ ID NO: 173 - protein, 425 aa, Homo sapiens
  mature soluble human PH20, amino acid residues 36-460
LNFRAPPVIPNVPFLWAWNAPSEFCLGKFDEPLDMSLFSFIGSPRINATGQGVTIFYVDRLGYYPYIDSITGVTVNGGIPQKISLQDHLDKAKKDITFYMPVDNLGMAVIDWEEWRPTWARNWKPKDVYKNRSIELVQQQNVQLSLTEATEKAKQEFEKAGKDFLVETIKLGKLLRPNHLWGYYLFPDCYNHHYKKPGYNGSCFNVEIKRNDDLSWLWNESTALYPSIYLNTQQSPVAATLYVRNRVREAIRVSKIPDAKSPLPVFAYTRIVFTDQVLKFLSQDELVYTFGETVALGASGIVIWGTLSIMRSMKSCLLLDNYMETILNPYIINVTLAAKMCSQVLCQEQGVCIRKNWNSSDYLHLNPDNFAIQLEKGGKFTVRGKPTLEDLEQFSEKFYCSCYSTLSCKEKADVKDTDAVDVCIA

SEQ ID NO: 174 - protein, 423 aa, Homo sapiens
  mature soluble human PH20, amino acid residues 36-458
LNFRAPPVIPNVPFLWAWNAPSEFCLGKFDEPLDMSLFSFIGSPRINATGQGVTIFYVDRLGYYPYIDSITGVTVNGGIPQKISLQDHLDKAKKDITFYMPVDNLGMAVIDWEEWRPTWARNWKPKDVYKNRSIELVQQQNVQLSLTEATEKAKQEFEKAGKDFLVETIKLGKLLRPNHLWGYYLFPDCYNHHYKKPGYNGSCFNVEIKRNDDLSWLWNESTALYPSIYLNTQQSPVAATLYVRNRVREAIRVSKIPDAKSPLPVFAYTRIVFTDQVLKFLSQDELVYTFGETVALGASGIVIWGTLSIMRSMKSCLLLDNYMETILNPYIINVTLAAKMCSQVLCQEQGVCIRKNWNSSDYLHLNPDNFAIQLEKGGKFTVRGKPTLEDLEQFSEKFYCSCYSTLSCKEKADVKDTDAVDVC

SEQ ID NO: 175 - protein, 421 aa, Homo sapiens
  mature soluble human PH20, amino acid residues 36-456
LNFRAPPVIPNVPFLWAWNAPSEFCLGKFDEPLDMSLFSFIGSPRINATGQGVTIFYVDRLGYYPYIDSITGVTVNGGIPQKISLQDHLDKAKKDITFYMPVDNLGMAVIDWEEWRPTWARNWKPKDVYKNRSIELVQQQNVQLSLTEATEKAKQEFEKAGKDFLVETIKLGKLLRPNHLWGYYLFPDCYNHHYKKPGYNGSCFNVEIKRNDDLSWLWNESTALYPSIYLNTQQSPVAATLYVRNRVREAIRVSKIPDAKSPLPVFAYTRIVFTDQVLKFLSQDELVYTFGETVALGASGIVIWGTLSIMRSMKSCLLLDNYMETILNPYIINVTLAAKMCSQVLCQEQGVCIRKNWNSSDYLHLNPDNFAIQLEKGGKFTVRGKPTLEDLEQFSEKFYCSCYSTLSCKEKADVKDTDAVD

SEQ ID NO: 176 - protein, 419 aa, Homo sapiens
  mature soluble human PH20, amino acid residues 36-454
LNFRAPPVIPNVPFLWAWNAPSEFCLGKFDEPLDMSLFSFIGSPRINATGQGVTIFYVDRLGYYPYIDSITGVTVNGGIPQKISLQDHLDKAKKDITFYMPVDNLGMAVIDWEEWRPTWARNWKPKDVYKNRSIELVQQQNVQLSLTEATEKAKQEFEKAGKDFLVETIKLGKLLRPNHLWGYYLFPDCYNHHYKKPGYNGSCFNVEIKRNDDLSWLWNESTALYPSIYLNTQQSPVAATLYVRNRVREAIRVSKIPDAKSPLPVFAYTRIVFTDQVLKFLSQDELVYTFGETVALGASGIVIWGTLSIMRSMKSCLLLDNYMETILNPYIINVTLAAKMCSQVLCQEQGVCIRKNWNSSDYLHLNPDNFAIQLEKGGKFTVRGKPTLEDLEQFSEKFYCSCYSTLSCKEKADVKDTDA

SEQ ID NO: 177 - protein, 417 aa, Homo sapiens
  mature soluble human PH20, amino acid residues 36-452
LNFRAPPVIPNVPFLWAWNAPSEFCLGKFDEPLDMSLFSFIGSPRINATGQGVTIFYVDRLGYYPYIDSITGVTVNGGIPQKISLQDHLDKAKKDITFYMPVDNLGMAVIDWEEWRPTWARNWKPKDVYKNRSIELVQQQNVQLSLTEATEKAKQEFEKAGKDFLVETIKLGKLLRPNHLWGYYLFPDCYNHHYKKPGYNGSCFNVEIKRNDDLSWLWNESTALYPSIYLNTQQSPVAATLYVRNRVREAIRVSKIPDAKSPLPVFAYTRIVFTDQVLKFLSQDELVYTFGETVALGASGIVIWGTLSIMRSMKSCLLLDNYMETILNPYIINVTLAAKMCSQVLCQEQGVCIRKNWNSSDYLHLNPDNFAIQLEKGGKFTVRGKPTLEDLEQFSEKFYCSCYSTLSCKEKADVKDT

SEQ ID NO: 178 - protein, 415 aa, Homo sapiens
  mature soluble human PH20, amino acid residues 36-450
LNFRAPPVIPNVPFLWAWNAPSEFCLGKFDEPLDMSLFSFIGSPRINATGQGVTIFYVDRLGYYPYIDSITGVTVNGGIPQKISLQDHLDKAKKDITFYMPVDNLGMAVIDWEEWRPTWARNWKPKDVYKNRSIELVQQQNVQLSLTEATEKAKQEFEKAGKDFLVETIKLGKLLRPNHLWGYYLFPDCYNHHYKKPGYNGSCFNVEIKRNDDLSWLWNESTALYPSIYLNTQQSPVAATLYVRNRVREAIRVSKIPDAKSPLPVFAYTRIVFTDQVLKFLSQDELVYTFGETVALGASGIVIWGTLSIMRSMKSCLLLDNYMETILNPYIINVTLAAKMCSQVLCQEQGVCIRKNWNSSDYLHLNPDNFAIQLEKGGKFTVRGKPTLEDLEQFSEKFYCSCYSTLSCKEKADVK

SEQ ID NO: 179 - protein, 473 aa, Homo sapiens
  mature soluble human PH20, amino acid residues 36-508
LNFRAPPVIPNVPFLWAWNAPSEFCLGKFDEPLDMSLFSFIGSPRINATGQGVTIFYVDRLGYYPYIDSITGVTVNGGIPQKISLQDHLDKAKKDITFYMPVDNLGMAVIDWEEWRPTWARNWKPKDVYKNRSIELVQQQNVQLSLTEATEKAKQEFEKAGKDFLVETIKLGKLLRPNHLWGYYLFPDCYNHHYKKPGYNGSCFNVEIKRNDDLSWLWNESTALYPSIYLNTQQSPVAATLYVRNRVREAIRVSKIPDAKSPLPVFAYTRIVFTDQVLKFLSQDELVYTFGETVALGASGIVIWGTLSIMRSMKSCLLLDNYMETILNPYIINVTLAAKMCSQVLCQEQGVCIRKNWNSSDYLHLNPDNFAIQLEKGGKFTVRGKPTLEDLEQFSEKFYCSCYSTLSCKEKADVKDTDAVDVCIADGVCIDAFLKPPMETEEPQIFYNASPSTLSATMFIVSILFLIISSVAS

SEQ ID NO: 180 - protein, 471 aa, Homo sapiens
  mature soluble human PH20, amino acid residues 36-506
LNFRAPPVIPNVPFLWAWNAPSEFCLGKFDEPLDMSLFSFIGSPRINATGQGVTIFYVDRLGYYPYIDSITGVTVNGGIPQKISLQDHLDKAKKDITFYMPVDNLGMAVIDWEEWRPTWARNWKPKDVYKNRSIELVQQQNVQLSLTEATEKAKQEFEKAGKDFLVETIKLGKLLRPNHLWGYYLFPDCYNHHYKKPGYNGSCFNVEIKRNDDLSWLWNESTALYPSIYLNTQQSPVAATLYVRNRVREAIRVSKIPDAKSPLPVFAYTRIVFTDQVLKFLSQDELVYTFGETVALGASGIVIWGTLSIMRSMKSCLLLDNYMETILNPYIINVTLAAKMCSQVLCQEQGVCIRKNWNSSDYLHLNPDNFAIQLEKGGKFTVRGKPTLEDLEQFSEKFYCSCYSTLSCKEKADVKDTDAVDVCIADGVCIDAFLKPPMETEEPQIFYNASPSTLSATMFIVSILFLIISSV

SEQ ID NO: 181 - protein, 469 aa, Homo sapiens
  mature soluble human PH20, amino acid residues 36-504
LNFRAPPVIPNVPFLWAWNAPSEFCLGKFDEPLDMSLFSFIGSPRINATGQGVTIFYVDRLGYYPYIDSITGVTVNGGIPQKISLQDHLDKAKKDITFYMPVDNLGMAVIDWEEWRPTWARNWKPKDVYKNRSIELVQQQNVQLSLTEATEKAKQEFEKAGKDFLVETIKLGKLLRPNHLWGYYLFPDCYNHHYKKPGYNGSCFNVEIKRNDDLSWLWNESTALYPSIYLNTQQSPVAATLYVRNRVREAIRVSKIPDAKSPLPVFAYTRIVFTDQVLKFLSQDELVYTFGETVALGASGIVIWGTLSIMRSMKSCLLLDNYMETILNPYIINVTLAAKMCSQVLCQEQGVCIRKNWNSSDYLHLNPDNFAIQLEKGGKFTVRGKPTLEDLEQFSEKFYCSCYSTLSCKEKADVKDTDAVDVCIADGVCIDAFLKPPMETEEPQIFYNASPSTLSATMFIVSILFLIIS

SEQ ID NO: 182 - protein, 467 aa, Homo sapiens
  mature soluble human PH20, amino acid residues 36-502
LNFRAPPVIPNVPFLWAWNAPSEFCLGKFDEPLDMSLFSFIGSPRINATGQGVTIFYVDRLGYYPYIDSITGVTVNGGIPQKISLQDHLDKAKKDITFYMPVDNLGMAVIDWEEWRPTWARNWKPKDVYKNRSIELVQQQNVQLSLTEATEKAKQEFEKAGKDFLVETIKLGKLLRPNHLWGYYLFPDCYNHHYKKPGYNGSCFNVEIKRNDDLSWLWNESTALYPSIYLNTQQSPVAATLYVRNRVREAIRVSKIPDAKSPLPVFAYTRIVFTDQVLKFLSQDELVYTFGETVALGASGIVIWGTLSIMRSMKSCLLLDNYMETILNPYIINVTLAAKMCSQVLCQEQGVCIRKNWNSSDYLHLNPDNFAIQLEKGGKFTVRGKPTLEDLEQFSEKFYCSCYSTLSCKEKADVKDTDAVDVCIADGVCIDAFLKPPMETEEPQIFYNASPSTLSATMFIVSILFLI

SEQ ID NO: 183 - protein, 465 aa, Homo sapiens
  mature soluble human PH20, amino acid residues 36-500
LNFRAPPVIPNVPFLWAWNAPSEFCLGKFDEPLDMSLFSFIGSPRINATGQGVTIFYVDRLGYYPYIDSITGVTVNGGIPQKISLQDHLDKAKKDITFYMPVDNLGMAVIDWEEWRPTWARNWKPKDVYKNRSIELVQQQNVQLSLTEATEKAKQEFEKAGKDFLVETIKLGKLLRPNHLWGYYLFPDCYNHHYKKPGYNGSCFNVEIKRNDDLSWLWNESTALYPSIYLNTQQSPVAATLYVRNRVREAIRVSKIPDAKSPLPVFAYTRIVFTDQVLKFLSQDELVYTFGETVALGASGIVIWGTLSIMRSMKSCLLLDNYMETILNPYIINVTLAAKMCSQVLCQEQGVCIRKNWNSSDYLHLNPDNFAIQLEKGGKFTVRGKPTLEDLEQFSEKFYCSCYSTLSCKEKADVKDTDAVDVCIADGVCIDAFLKPPMETEEPQIFYNASPSTLSATMFIVSILF

SEQ ID NO: 184 - protein, 463 aa, Homo sapiens
  mature soluble human PH20, amino acid residues 36-498
LNFRAPPVIPNVPFLWAWNAPSEFCLGKFDEPLDMSLFSFIGSPRINATGQGVTIFYVDRLGYYPYIDSITGVTVNGGIPQKISLQDHLDKAKKDITFYMPVDNLGMAVIDWEEWRPTWARNWKPKDVYKNRSIELVQQQNVQLSLTEATEKAKQEFEKAGKDFLVETIKLGKLLRPNHLWGYYLFPDCYNHHYKKPGYNGSCFNVEIKRNDDLSWLWNESTALYPSIYLNTQQSPVAATLYVRNRVREAIRVSKIPDAKSPLPVFAYTRIVFTDQVLKFLSQDELVYTFGETVALGASGIVIWGTLSIMRSMKSCLLLDNYMETILNPYIINVTLAAKMCSQVLCQEQGVCIRKNWNSSDYLHLNPDNFAIQLEKGGKFTVRGKPTLEDLEQFSEKFYCSCYSTLSCKEKADVKDTDAVDVCIADGVCIDAFLKPPMETEEPQIFYNASPSTLSATMFIVSI

SEQ ID NO: 185 - protein, 461 aa, Homo sapiens
  mature soluble human PH20, amino acid residues 36-496
LNFRAPPVIPNVPFLWAWNAPSEFCLGKFDEPLDMSLFSFIGSPRINATGQGVTIFYVDRLGYYPYIDSITGVTVNGGIPQKISLQDHLDKAKKDITFYMPVDNLGMAVIDWEEWRPTWARNWKPKDVYKNRSIELVQQQNVQLSLTEATEKAKQEFEKAGKDFLVETIKLGKLLRPNHLWGYYLFPDCYNHHYKKPGYNGSCFNVEIKRNDDLSWLWNESTALYPSIYLNTQQSPVAATLYVRNRVREAIRVSKIPDAKSPLPVFAYTRIVFTDQVLKFLSQDELVYTFGETVALGASGIVIWGTLSIMRSMKSCLLLDNYMETILNPYIINVTLAAKMCSQVLCQEQGVCIRKNWNSSDYLHLNPDNFAIQLEKGGKFTVRGKPTLEDLEQFSEKFYCSCYSTLSCKEKADVKDTDAVDVCIADGVCIDAFLKPPMETEEPQIFYNASPSTLSATMFIV

SEQ ID NO: 186 - protein, 459 aa, Homo sapiens
  mature soluble human PH20, amino acid residues 36-494
LNFRAPPVIPNVPFLWAWNAPSEFCLGKFDEPLDMSLFSFIGSPRINATGQGVTIFYVDRLGYYPYIDSITGVTVNGGIPQKISLQDHLDKAKKDITFYMPVDNLGMAVIDWEEWRPTWARNWKPKDVYKNRSIELVQQQNVQLSLTEATEKAKQEFEKAGKDFLVETIKLGKLLRPNHLWGYYLFPDCYNHHYKKPGYNGSCFNVEIKRNDDLSWLWNESTALYPSIYLNTQQSPVAATLYVRNRVREAIRVSKIPDAKSPLPVFAYTRIVFTDQVLKFLSQDELVYTFGETVALGASGIVIWGTLSIMRSMKSCLLLDNYMETILNPYIINVTLAAKMCSQVLCQEQGVCIRKNWNSSDYLHLNPDNFAIQLEKGGKFTVRGKPTLEDLEQFSEKFYCSCYSTLSCKEKADVKDTDAVDVCIADGVCIDAFLKPPMETEEPQIFYNASPSTLSATMF

SEQ ID NO: 187 - protein, 457 aa, Homo sapiens
  mature soluble human PH20, amino acid residues 36-492
LNFRAPPVIPNVPFLWAWNAPSEFCLGKFDEPLDMSLFSFIGSPRINATGQGVTIFYVDRLGYYPYIDSITGVTVNGGIPQKISLQDHLDKAKKDITFYMPVDNLGMAVIDWEEWRPTWARNWKPKDVYKNRSIELVQQQNVQLSLTEATEKAKQEFEKAGKDFLVETIKLGKLLRPNHLWGYYLFPDCYNHHYKKPGYNGSCFNVEIKRNDDLSWLWNESTALYPSIYLNTQQSPVAATLYVRNRVREAIRVSKIPDAKSPLPVFAYTRIVFTDQVLKFLSQDELVYTFGETVALGASGIVIWGTLSIMRSMKSCLLLDNYMETILNPYIINVTLAAKMCSQVLCQEQGVCIRKNWNSSDYLHLNPDNFAIQLEKGGKFTVRGKPTLEDLEQFSEKFYCSCYSTLSCKEKADVKDTDAVDVCIADGVCIDAFLKPPMETEEPQIFYNASPSTLSAT

SEQ ID NO: 188 - protein, 453 aa, Homo sapiens
  mature soluble human PH20, amino acid residues 36-488
LNFRAPPVIPNVPFLWAWNAPSEFCLGKFDEPLDMSLFSFIGSPRINATGQGVTIFYVDRLGYYPYIDSITGVTVNGGIPQKISLQDHLDKAKKDITFYMPVDNLGMAVIDWEEWRPTWARNWKPKDVYKNRSIELVQQQNVQLSLTEATEKAKQEFEKAGKDFLVETIKLGKLLRPNHLWGYYLFPDCYNHHYKKPGYNGSCFNVEIKRNDDLSWLWNESTALYPSIYLNTQQSPVAATLYVRNRVREAIRVSKIPDAKSPLPVFAYTRIVFTDQVLKFLSQDELVYTFGETVALGASGIVIWGTLSIMRSMKSCLLLDNYMETILNPYIINVTLAAKMCSQVLCQEQGVCIRKNWNSSDYLHLNPDNFAIQLEKGGKFTVRGKPTLEDLEQFSEKFYCSCYSTLSCKEKADVKDTDAVDVCIADGVCIDAFLKPPMETEEPQIFYNASPST

SEQ ID NO: 189 - protein, 451 aa, Homo sapiens
  mature soluble human PH20, amino acid residues 36-486
LNFRAPPVIPNVPFLWAWNAPSEFCLGKFDEPLDMSLFSFIGSPRINATGQGVTIFYVDRLGYYPYIDSITGVTVNGGIPQKISLQDHLDKAKKDITFYMPVDNLGMAVIDWEEWRPTWARNWKPKDVYKNRSIELVQQQNVQLSLTEATEKAKQEFEKAGKDFLVETIKLGKLLRPNHLWGYYLFPDCYNHHYKKPGYNGSCFNVEIKRNDDLSWLWNESTALYPSIYLNTQQSPVAATLYVRNRVREAIRVSKIPDAKSPLPVFAYTRIVFTDQVLKFLSQDELVYTFGETVALGASGIVIWGTLSIMRSMKSCLLLDNYMETILNPYIINVTLAAKMCSQVLCQEQGVCIRKNWNSSDYLHLNPDNFAIQLEKGGKFTVRGKPTLEDLEQFSEKFYCSCYSTLSCKEKADVKDTDAVDVCIADGVCIDAFLKPPMETEEPQIFYNASP

SEQ ID NO: 190 - DNA, 2105 bp, Bos taurus
  cow PH20 DNA
ggtttatctctgttcttggtgaggagacagacagaattgactgctgtgctcatccgcgagggtaaatgtgctcagctctttatggagtagtggagacgggcagagatgacaagatgaagcaacttgcaaaacattcctaaatacgaaggaagaagaatatttaaatgtaaatcatcattattcatttttatccatcaaagtggcttcattctgtgttcatatcttgcatcaaatattaggtacaccaaagcgtgtaggagaaaaaagtgcctttcacagtcatcgctctttgtgatgagaatgctgaggcgccaccatatctcctttcggagctttgctgggtctagcggaacaccccaggcagtgttcaccttccttctgcttccgtgttgtttggctctggacttcagagcaccccctcttatttcaaacacttctttcctctgggcctggaatgccccagttgaacgttgtgttaacagaagatttcaactacctccagatctgagactcttctctgtaaaaggaagcccccagaaaagtgctaccggacaatttattacattattttatgctgatagacttggctactatcctcatatagatgaaaaaacaggcaaaaccgtattcggaggaattccccagttgggaaacttaaaaagtcatatggagaaagcaaaaaatgacattgcctattacataccaaatgacagcgtgggcttggcggtcattgactgggaaaactggaggcctacctgggcaagaaactggaaacctaaagatgtttacagggatgagtcagttgagttggttctgcaaaaaaatccgcaactcagtttcccagaggcttccaagattgcaaaagtggattttgagacagcaggaaagagtttcatgcaagagactttaaaactgggaaaattacttcggccaaatcacttatggggttattatctttttcctgattgttacaatcataatcataaccaacctacttacaatggaaattgccctgatgtagaaaaaaggagaaatgatgatctcgagtggttgtggaaggaaagcactgcccttttcccttctgtttatttgaatatcaggttaaaatctactcaaaatgctgccttgtatgttcgtaatcgtgtccaggaagccattcggttgtctaaaatagcgagtgtcgaaagtccacttccggtttttgtatatgcccgtccagtttttactgatgggtcttcaacatatctttctcagggtgaccttgtgaattcggttggtgagatcgtttctctaggtgcctctgggattataatgtggggcagtctcaatctaagcttatctatgcaatcttgcatgaacctaggcacttacttgaacactacactgaatccttacataatcaacgtcaccctagccgccaaaatgtgcagccaagtgctttgccacaatgaaggagtgtgtacaaggaaacactggaattcaagcgactatcttcacctgaacccaatgaattttgctattcaaactggggaaggtggaaaatacacagtacctgggacagtcacacttgaagacttgcaaaagttttctgatacattttattgcagttgttatgccaacatccactgtaagaagagagttgatataaaaaatgttcatagtgttaacgtgtgtatggcagaagacatttgtatagacagccctgtgaagttacaacccagtgatcattcctccagccaggaggcatctactaccaccttcagcagtatctcaccctccactacaactgccacagtatctccatgtactcctgagaaacactcccctgagtgcctcaaagtcaggtgttcggaagtcatccccaacgtcacccaaaaggcgtgtcaaagtgttaaattgaagaacatttcctatcagtcacctattcaaaatattaaaaatcaaacaacctattaaaattaaattcagtaaaaaaaaaaaaaaaaaaaaaaaaaaaaaaaaaaaaaaaaaaaaaaaaaaaaaaaaaaaaaaaaaaaaaaaaaaaaaaaaaaaaaaaaaaaaaaaaaaaaaaaaaaaaaaaaaaaaaaaagaaaaaaaaaaaaaaa

SEQ ID NO: 191 - DNA, 1971 bp, Bos taurus
  cow Hyal1 DNA
ttggtgcgcctggtgccagacttaaggaacagaatcttgctgatgcctgcacaggccctcgccctggggtcaggaagtttggagaatgaggcctttcagccttgaggtttccctacacctgccctgggctatggcagcccacttgcttcctgtctgcaccctgttcctgaacttgctcagcatgacccaaggctcccgggaccctgtggtccccaaccagcccttcactaccatctggaatgccaacaccgagtggtgtatgaagaaacacggcgtggacgtagacatcagtatctttgatgtggtgaccaacccggggcagaccttccgcggccctaacatgaccattttctacagctcccagctgggtacctacccttactatacatctgctggggagcctgtgtttggtggcctgccccagaatgccagcctgaatgcccacctggcccgcacattccaggacatcctggctgccatgcctgagcctcgcttctcagggctggcagtcattgactgggaggcatggcgcccgcgctgggccttcaactgggacaccaaggacatttaccggcagcgctcacgggcattggtacagaagcagcacccagactggctagctcctcgggtggaggccgcagctcaggaccagttcgagggggctgcagaggagtggatggcaggcaccctcaagctgggacaagcactgcgccctcagggcctctggggcttctataatttccctgagtgctacaactatgactttaaaagtcccaactatacaggccggtgtccactaaacatctgtgcccagaatgaccagctcgggtggctgtggggccagagccgtgccctctaccccagcatctacctgcctgcagcactggagggcacgaagaagacacagatgttcgtgcagcaccgtgtggctgaggcattccgtgtggcagcgggtgcgggggaccccaagctgccggtgctgccctacatgcagctcttctacgacatgactaaccactttctgcccgcggaggagctggagcacagcctgggggagagtgcagcccagggtgcagcgggagtggtgctctgggtgagctggctgagcacaagcaccaaggaatcatgccaggccatcaaggagtatgtggacacgacgctgggaccctccatcctgaatgtgaccagcggggctcgtctgtgcagtcaggtcctatgctccggccatggccgttgtgcccggcgccccagttaccccaaggcccgcctcatcctcaactccaccagtttttccatcaagcctacacctggtggtgggcccctgaccctacaaggtgccctctcgctcgaggatcggttgcggatggcagtggagttcgaatgtcgctgctaccgtgggtggagggggacacggtgtgagcagtggggcatgtggtgattggcatgggcacgcactgagtacctgatgcaagctgggcctggctaggtagggctttcccaagtccaggcagtcacaggagtcatggttacagtcagaagtccactcagccagtgtcatgagcatacaccagtgtgcacacctgcttacagaccaagatagctgcataaggacacggtgtgagcagtggggcatatgctgattggcatgggcacacactgagtacctgatgcaatctgggcctggctagggctttcccaagtccaggcagtcacaggagtcatggttaggcatccagtcacaggagtcatgtcaggcatcctgccgacagagtcaaaaatacttcctctggagacactgagtcagtcttcaaacagaagcagtcacaagcactgacattcgggacttccctggccatccagtggttaagacacggagcttccactgcagggggcacgggcagagactaagatcacgaatgctaagcggtgcggttaaacaaataacaaataaataaactgacattcactggg

SEQ ID NO: 192 - DNA, 1912 bp, Bos taurus
  cow Hyal2 DNA
caagtcgccggcgggctgcccaaagggcaggagctggcgcgaatagcttggctagagacttaccccgggaaggagggaggccgccgacctactgggccgacggactcccacacagttcctgagctggtgcctggcaggtgacactgacttcctgcagcccccagcatgtggacaggcctgggccccgccgtcacactggccctggtgttggtggtggcatgggccacggagctgaagcccacagcaccacccatcttcacgggccggccctttgtggtcgcatgggatgtgcccacacaggactgtggcccgcgccacaagatgccattggacccaaaggacatgaaggcctttgatgttcaggcttcacctaacgagggttttgtaaatcagaacatcaccatcttctaccgtgaccggctgggcatgtatccacacttcaattcggtggggaggtcagtacatggtggtgtgccacagaatggcagcctctgggtacacctggagatgctgaagggacacgtggaacactacattcgtacacaggagcctgcagggctggcagtcatcgactgggaggactggcggccagtgtgggtgcgcaactggcaggacaaggatgtgtaccgccgattatcacgccatttggtagccattcgccaccctgattggccaccagagcgcgtagccaaggaggcgcagtatgagtttgagttcgctgcacggcagttcatgctggagacattgcgatttgtcaaggcgtttcggcctcggcacctatggggcttctacctcttccctgactgttacaaccatgattatgtgcagaactgggagacctatacaggccgctgccctgatgttgaggtctcccgaaatgaccagctggcctggctctgggccgagagcacggccctcttcccctctgtctacttggaagagacactggcttcctccactcacggccgcaactttgtcagctttcgtgtccaggaggctcttcgcgtggctgacgtccaccatgccaaccatgcactccccgtctacgtcttcacgaggcccacctatagccgtggactcacagggcttagcgagatggatctcatctccaccattggtgagagtgctgccctgggtgcagctggcgtcatcctctggggtgacgcagggtttaccaccagcaacgagacctgccgacgcctcaaggattatctgactcggtcattggtaccctatgtcgtcaatgtgtcctgggctgcccagtactgcagctgggcccagtgccatggccatgggcgctgtgtgcgccgggaccccaacgctcacaccttcctgcacctcagtgccagcagcttccgtctagtgcctagccacgcacctgatgagccgcggctgcgaccagagggggaactcagttgggccgaccgcaaccacctacagatgcactttcgctgccagtgctacttaggctggggcggtgagcaatgccagtgggaccgcaggcgggcagctgggggtgccagtggggcctgggctgggtcccacctcactggcctgctggcagtggcagtcctggccttcacctagactttgtaagggtctctcacccagctgccacgccagctggcctctgccacaaggggtctgtcaggcatgtaggagcctgcaaggggtggacaaaccagagtctggaggggcagagccctctgggatgcctggtaggatgtccttaccagctcccaccccctgttctaagggggaggggcagtcccctggaaggccccgtctctccctgccagagaggaagaggggcacagctgggccggggaggacctgaccctactcccctgcccctggatagtttattattattattttggggtctcttttgtaaattaaatataaaacaact

SEQ ID NO: 193 - DNA, 1537 bp, Ovis aries
  sheep Hyal2 DNA
gcaaatgacactgacttcctgcagcccccagcatgtggacaggcctgggccccgccgtcacactggccctggtgttggtggtggcatgggccacagagctgaagcccacagcaccacccatcttcacgggccggccctttgtggttgcatgggatgtgcccacacaggactgtggcccacgccacaagatgccattggacccaaaggacatgaaggcctttgatgtgcaggcctcacctaacgagggttttgtaaatcagaacatcaccatcttctaccgtgaccggctgggcatgtatccacacttcaactcggtggggaggtcagtccatggtggtgtgccacagaatggcagcctctgggtacacctggagatgctgaagggacacgtggaacactacattcgtacacaggagcctgcagggctggcagtcatcgactgggaggactggcggccagtgtgggtgcgcaactggcaggacaaggatgtgtaccgccgattatcacgccagttggtggccagtcaccaccccgattggccaccagagcgcatagtcaaggaggcgcagtatgagtttgagttcgctgcacggcagttcatgctggagacactgcgatttgtcaaggcgtttcggcctcggcacctatggggcttctacctcttccctgactgttacaaccatgattatgtgcaaaactgggagacctatacaggccgctgccctgatgttgaggtctcccgaaatgaccagctgtcctggctctgggccgagagcacagccctcttcccctctgtctacctggaagagacgctggcttcctccactcacggccgcaactttgtcagctttcgtgtccaggaggctcttcgcgtggctgacgtccaccatgccaaccatgcactcccagtctacgtcttcacgaggcccacctacagccgtggactcacagggcttagcgagatggatctcatctccaccattggtgagagtgctgccctgggtgcagccggcgtcatcctctggggtgacgcagggtttaccaccagcaacgagacctgccgacgcctcaaggattatctgactcggtcactggtaccctatgtcgtcaatgtgtcctgggctgcccagtactgcagctgggcccagtgccatggccatgggcgctgtgtgcgccgggaccccaacgctcacaccttcctgcacctcagtgccagcagcttccgtctagtgcctagccacgcacctgatgagccgcggctgcgaccagagggggagctcagttgggccgaccgcaaccacctacagacgcactttcgctgccagtgctacttaggctggggcggtgagcagtgccagtgggaccgcaggcgggcagctgggggtgccagtggggcctgggctgggtcccacctcactggcctgctggcagtggcagtcctggccttcacctggacttcgtaagggtctcacccagctgccaggccagctggcctctgccacaaggggtctgccaggcatgtagcagcccacaaggg

SEQ ID NO: 194 - DNA, 1967 bp, Ovis aries
  sheep hyaluronidase DNA
actcctgtttatctctgttcttggtgaggagacagacagaattgactgctgtgctcatccaccaggttacagatgaagcaacttgcaaaacattcctaaatacgaaggaagaagagtatttaaacgtaaatcatcattattcatttttatccatcaaagtagcttcattctgtgttcctatcttgcatcaaatattaggtaaaccaaagtgtgtaggagaaaaaagtgcttttcatagtcatcgctctttgtgaagagaatgctaaggcgccgccatatctcctttaggagctttgttggggccagtggaacaccccaggcggcgctcgccttccttctgcttccatgttggttggctctggacttcagagcaccccctcttatttcaaacacttctttcctctgggcctggaatgccccagctgaacgttgtgttaaaatctttaaactacctccagatctgagactcttctctgtaaaaggaagcccccaaaaaagtgctacgggacaatttattacattattttatgctgatagacttggctactatcctcatatagatgaaaaaacaggcaacaccgtatatggaggaattccccagttgggaaacttaaaaaatcatttggaaaaagccaaaaaagacattgcctattatataccaaatgacagcgtgggcttggcggtcattgactgggaaaactggaggcctacctgggcaagaaactggaaacctaaagatgtttacagggatgagtctgttgagttggttctgcaaaaaaatccacaactcagtttcccagaggcttccaagattgcaaaagtggattttgagacagcaggaaagagtttcatgcaagagactttaaaactgggaaaattacttcggccaaatcacttatggggttattatctttttcctgattgttacaatcataattataaccagcctacttacaatggaaattgctctgatttagaaaaaaggagaaatgatgatctcgactggttgtggaaggaaagcactgcccttttcccttctgtttatttgaatatcaagttaaaatctactccaaaagctgccttctatgttcgtaatcgtgtccaggaagccattcggttgtctaaaatagcgagtgttgaaagtccacttccggtttttgtatatcaccgtccagtttttactgatgggtcttcaacatacctttctcagggtgaccttgtgaattcggttggtgagatcgttgctctaggtgcctctgggattataatgtggggcagtctcaatctaagcctaactatgcaatcttgcatgaacctaggcaattacttgaacactacactgaatccttacataatcaacgtcaccctagcagccaaaatgtgcagccaagtgctttgccacgatgaaggagtgtgtacaaggaaacaatggaattcaagcgactatcttcacctgaacccaatgaattttgctattcaaactgggaaaggtggaaaatacacagtacctgggaaagtcacacttgaagacctgcaaacgttttctgataaattttattgcagttgttatgccaacatcaactgtaagaagagagttgatataaaaaatgttcatagtgttaatgtatgtatggcagaagacatttgtatagagggccctgtgaagttacaacccagtgatcattcctctagccagaatgaggcatctactaccaccgtcagcagtatctcaccctctactacagccaccacagtatctccatgtactcctgagaaacagtcccctgagtgcctcaaagtcaggtgtttggaagccatcgccaacgtcacccaaacggggtgtcaaggtgttaaatggaagaacacttccagtcagtcaagtattcaaaatattaaaaatcaaacaacctattaaaatataaattcagtgcttattaagaaaaaaaaaaaaaaaaaaaaaaaaaaaa

SEQ ID NO: 195 - DNA, 6458 bp, Capra hircus
  goat b-casein promoter region and partial cds, Accession:AY834229.1
atgattttgcaaccccctgcctcaggagacactgggaaatttcctgagacatttttgattccaaaagctgtgcagttggtgcttctaccatcttcgtggtagaggtcaaggatgctgctaaacattctacaacacattaagaaaacccccacaacaaagaattcttccgccaaaaatatcaataatatgaaggttgaaaaatactggtctagcatgtagtatgtgctcaatagcaaggagagaaaagaaagccttcctcactgattaatgcaaagaaatagaggaaaacaatagaatgggaaagactagagagctcttcaagcaaattagagatatcaagggaacatttcacgcaaagatgggcacaataaaggacagaaattttatggaggagttgctgatggagagggaggcctggcgtgctgcgattcctggggtcgcaaagagtcggacacaactgagcgactgaattgaactgaactgaactggacaaagcagaagatattaagaagaggtggtaagaatacacagaagaacaatataaaaaagatcttcatgacccagataaccacgatgatgtgatcactcacctagagccagacaccctggaatgcaaagtcaaacggccttagaaagcctcactatgaacaaagctagtggaggtaatggaattccagttgagctatttcaaatcttaaaaggtgatgctgtgaaagtgctgcactcaatatgtcagcaaatttggaaaactcagcagtggccacaggactgccacaatcccaaagaaaagcaatgacaaagaatgttcaaacacccacatgattgcactcatctcacatgctagcaaaataactctcaaaattctccaagccaggctccaacagtacgtggaccatgaacttccagatgttcaagctggatttagaaaaggcagaggaaccagagatcaaattgccaacatccattggatcatcaaaaaagcacgagagttccagaaaaacatctgctttattgactacgctaaagcctttgattgtgtggatcacaataaactgtggaaaattcttcaagagatgggaataccagaccactttacctgcctcctgagaaatctgtatacaggtccagaagcagcagttagaactggacatggaacaacagactggttccaaactgcgaaaggggtacatcaaggaatattcattggaaggattgatgctgaagctgaaactcctatactttggccacctaatgtgaagatctgactcattggaaaagactccaatgctgggaaagattgaaggcaggagaagaggatgacagaggatgagatggttggatgggatcactgactcaatggacatgagtttgagtaagctccaggggttggtggtggacaggaaagcctggcgtgctgcagtccacaaggtcacaaagattcggacatgactgagtgactgaactgatactgatgtgctcaacaaatgtatcttgaacttgtgtgaagttctatggtcacatgtaaaggaagaataatcaggattagctgtgtgtcttaggaatcagggttctgagttttatgtgttcatagtatctgctggttcacaaaacatttttcttattctctggttcttgatttactttataaagtaatcttaatagttatacttcacatagatacgaaattattatatttggataatctcatggaaaggattaaatactccatctattacgagtaatgctgaactatctactcctacctaataatttgtcagaattcactaattctgtgttatattgtttctaaatctgaatcattatatgaatcctcagtattttgttttccttcctctatattttggaatttattaaacagtgcttcaaataatttttaggaaactgaagtttttagtaacagctctatctctaaatagctttagtatcttgaaaaagtaatacaaattctcacatccttaatttcctcttctctaaaatatctttaaaatattctatgaatgatatctcttaatatttatttttttggcaatccaacacagcttatgggatcttagttccccagtgagggattatatccatgccaactgcagtgaaagtacaaaatcctaaactggactcaccagggatttcccaatatctcctctagttcttatttctgaatatttttggtccctttattgtactcttcatccaacttttctattgatttctttcttgaggttattatttacttggtttcagttagaaatatatgcaaatctcaggactgcatatttcagattcattggccaatatgggaaaaaacctttggctgaacaaatcatgcttataaaaaatagtactagagcatcctactttgactatatcttgctcctcattcagggttatctaatacaatttccccacatgaaattcttttgcattataaaaatggaagctcttaggtaacattgcaaaaattcgagttgctcatatggcactttgcttcttactggtcattgtgttctgaggcttacctggacaggtggtacctgatgtcatcttaaattgctggctttttgattttccattggacaagcttctttctttagtatattgttaaggatttccttgatcaagattttacctacttttctggtccaattggtgagagacagtcataaggaaatgctgtgtttattgcacaatatgtaaagcatcttcctgagaaaataaaagggaaatgttgaatgggaaggatatgctttcttttgtattccttttctgagaaatcaaactttttcacctgtggccttggccaccaaaagctaacaaataaaggcatatgaagtagccaaggccttttctagttatatctataacactgagttcatttcatcatttattttcctgacttcctcctgggtccatatgagcagtcttagaatgaatattagctgaataatccaaatacatagtagatgttgatttgggttttctaagcaatccaagacttgtatgacagtaagatgtattaccatccaacacacatctcagcatgatataaatgcaaggtatattgtgaagaaaaatttttaattatgtcaaagtgcttactttagaaggtcatctatctgtcccaaagctgtgaatatatatattgaaggtaatgaatagatgaagctaaccttgtaaaaatgagtagtgtgaaatacaactacaattatgaacatctgtcactaaagaggcaaagaaacttgaagattgcttttgcaaatgggctcctattaataaaaagtacttttgaggtctggctcagactctattgtagtacttagggtaagaccctcctcctgtatgggctttcattttctttcttgcttccctcatttgcccttccatgaatactagctgataaacattgactataaaagatatgaggccaaacttgagctgtcccattttaataaatctgtataaataatatttgttctacaaaagtattatctaaataaatgttactttctgtcttaaaatccctcaacaaatccccactatctagagaataagattgacattccctggaatcacagcatgctttgtctgccattatctgacccctttctctttctctcttctcacctccatctactcctttttccttgcaattcatgacccagattcactgtttgatttggcttgcatgtgtgtgtgctgagttgcgtctgactgttatcaaccccatgaatgatagtccaccaggctctactgtccatgaaattttccagtcaagaatactggagtggattgcatttcctactccatttgattaatttagtgacttttaaatttctttttccatattcgggagcctattcttcctttttagtctatactctcttcactcttcaggtctaaggtatcatcgtgtgcttgttagcttgttactttctccattatagcttaagcactaacaactgttcaggttggcatgaaattgtgttctttgtgtggcctgtatatttctgttgtgtattagaatttaccccaagatctcaaagacccactgaatactaaagagacctcattgtggttacaataatttggggactgggccaaaactaccgtgcatcccagccaagatctgtagctactggacaatttcatttcctttatcagattgtgagttattcctgttaaaatgctccccagaatttctggggacagaaaaataggaagaattcatttcctaatcatgcagatttctaggaattcaaatccactgttggttttatttcaaaccacaaaattagcatgccattaaatactatatataaacagccactaaatcagatcattatccattcagcttctccttcacttcttctcctctactttggaaaaaaggtaagaatctcagatataatttcaggtgtatctgctactcatctttattttggactaggttaaaatgtagaaagaacataattgcttaaaatagatcttaaaaataagggtgtttaagataaggtttacactattttcagcagatatgttaaaaaatagaagtgactataaagacttgataaaaattatagtgactgcaaatgttttaggaatataataagatataataacggtggttgctattttctttagcacaagactagttaacaggctgtattaaaagatcttttcttgaattaaatattttcaatttgattaaacctacctcagccataaaggcaagcacatttcatttatactatggggatttgaataattattactgaagaagctctaccaacaaaaagtttatagagctatcatatttagtcaagagataaagagggttgttaggatatatatgctatttgaaaggtatttataaaagaagagtatatttatcaaaatttctcagaacatccaaatttcaagtttatcatttatcttacaatatttcaaaaatattaaaatagatactgaaatacagaagtaaattaaagagaaagtattttacttggtaaaaaaattctaggttggacagagagtgccaggaaacaaaaacaatgaaaaatgtgacctgacaggaattatagctcaaagtatagtagtaagtaatgaaatggcttaaaaattggtatataaaatgctagttataaaataaacaaaatgcaataatatcctccctacatgtaatgaattctaggtattatgctctttttggaagtcttgacaataaaaatttttttagaagtttataggcatcttgaataaagtgaaacaaattaagaattagtatccatgagaaaaatatagaacaattttcctaatttagtttgaaaatctgggattgaagatgtgtgtcaagagatgttggtggcaagaacatttttttttcaagaacttataaaaatgcaacaaaacaaaccatttaatacattttggtcaaaatcaataatgtattttattttatgctccaaggagcataaaattggggactgggcaagagaaactgacaccctggtaaattaccaagagataagtacacagttctatgtagagaaaataagcatagtgtatgatctctaaaattatgtgagacaaaggagagatgacattaggcatgtggggatgaagactgagtagagaagaaacaatctaatcagtccaagaaaacatctcgatcagtggaacaaatagaagaaatgctaaaatgaaacagaagtcttactggaaataaaagatatgcataagacaaaaattcatgaaaatcacttagtttagcagagaaaagataaaaataaagtatgaccttcttcatatacattgtttgatcatatgcacctcaataaaactgagtctccaacagaaatgaaacattaatattttgttcactgctctaatcccagaatctaagcgatatctggcaataaaaataataaatatatattttttaataaatgaatcaaccacttaatttttctgtaaatatctgtaacttctcttctgtctttccaaaaacactcataagtactgtgaatgagatgaaaaagagtgaagtaggatataggctgttagcagaaaacatctgaatggctggcagtgaaacattaacttgaaatgtaagattaatgagtaatagtaaattttaaccttggccatatgataaaatgttcattaatatttttctagaatacagggctttttgtttttgccatgaggtttgcaggatcttggttccctgaccagggatcaaacctgcactcccctggaagcatggagtcttggacatttgtattatacactatctttggttccttttaaagggaagtaattttacttaaataagaaaatagattgacaagtaatacgctgtttcctcatcttcccattcacaggaatcgagagccatgaaggtcctcatccttgcctgtctggtggctctggccattgcg

SEQ ID NO: 196 - DNA, 30 bp, Artificial Sequence
  primer Acb582
cagctagtattcatggaagggcaaatgagg

SEQ ID NO: 197 - DNA, 30 bp, Artificial Sequence
  primer Acb591
tagaggtcagggatgctgctaaacattctg

SEQ ID NO: 198 - DNA, 2686 bp, Artificial Sequence
  pUC18
tcgcgcgtttcggtgatgacggtgaaaacctctgacacatgcagctcccggagacggtcacagcttgtctgtaagcggatgccgggagcagacaagcccgtcagggcgcgtcagcgggtgttggcgggtgtcggggctggcttaactatgcggcatcagagcagattgtactgagagtgcaccatatgcggtgtgaaataccgcacagatgcgtaaggagaaaataccgcatcaggcgccattcgccattcaggctgcgcaactgttgggaagggcgatcggtgcgggcctcttcgctattacgccagctggcgaaagggggatgtgctgcaaggcgattaagttgggtaacgccagggttttcccagtcacgacgttgtaaaacgacggccagtgccaagcttgcatgcctgcaggtcgactctagaggatccccgggtaccgagctcgaattcgtaatcatggtcatagctgtttcctgtgtgaaattgttatccgctcacaattccacacaacatacgagccggaagcataaagtgtaaagcctggggtgcctaatgagtgagctaactcacattaattgcgttgcgctcactgcccgctttccagtcgggaaacctgtcgtgccagctgcattaatgaatcggccaacgcgcggggagaggcggtttgcgtattgggcgctcttccgcttcctcgctcactgactcgctgcgctcggtcgttcggctgcggcgagcggtatcagctcactcaaaggcggtaatacggttatccacagaatcaggggataacgcaggaaagaacatgtgagcaaaaggccagcaaaaggccaggaaccgtaaaaaggccgcgttgctggcgtttttccataggctccgcccccctgacgagcatcacaaaaatcgacgctcaagtcagaggtggcgaaacccgacaggactataaagataccaggcgtttccccctggaagctccctcgtgcgctctcctgttccgaccctgccgcttaccggatacctgtccgcctttctcccttcgggaagcgtggcgctttctcaaagctcacgctgtaggtatctcagttcggtgtaggtcgttcgctccaagctgggctgtgtgcacgaaccccccgttcagcccgaccgctgcgccttatccggtaactatcgtcttgagtccaacccggtaagacacgacttatcgccactggcagcagccactggtaacaggattagcagagcgaggtatgtaggcggtgctacagagttcttgaagtggtggcctaactacggctacactagaagaacagtatttggtatctgcgctctgctgaagccagttaccttcggaaaaagagttggtagctcttgatccggcaaacaaaccaccgctggtagcggtggtttttttgtttgcaagcagcagattacgcgcagaaaaaaaggatctcaagaagatcctttgatcttttctacggggtctgacgctcagtggaacgaaaactcacgttaagggattttggtcatgagattatcaaaaaggatcttcacctagatccttttaaattaaaaatgaagttttaaatcaatctaaagtatatatgagtaaacttggtctgacagttaccaatgcttaatcagtgaggcacctatctcagcgatctgtctatttcgttcatccatagttgcctgactccccgtcgtgtagataactacgatacgggagggcttaccatctggccccagtgctgcaatgataccgcgagacccacgctcaccggctccagatttatcagcaataaaccagccagccggaagggccgagcgcagaagtggtcctgcaactttatccgcctccatccagtctattaattgttgccgggaagctagagtaagtagttcgccagttaatagtttgcgcaacgttgttgccattgctacaggcatcgtggtgtcacgctcgtcgtttggtatggcttcattcagctccggttcccaacgatcaaggcgagttacatgatcccccatgttgtgcaaaaaagcggttagctccttcggtcctccgatcgttgtcagaagtaagttggccgcagtgttatcactcatggttatggcagcactgcataattctcttactgtcatgccatccgtaagatgcttttctgtgactggtgagtactcaaccaagtcattctgagaatagtgtatgcggcgaccgagttgctcttgcccggcgtcaatacgggataataccgcgccacatagcagaactttaaaagtgctcatcattggaaaacgttcttcggggcgaaaactctcaaggatcttaccgctgttgagatccagttcgatgtaacccactcgtgcacccaactgatcttcagcatcttttactttcaccagcgtttctgggtgagcaaaaacaggaaggcaaaatgccgcaaaaaagggaataagggcgacacggaaatgttgaatactcatactcttcctttttcaatattattgaagcatttatcagggttattgtctcatgagcggatacatatttgaatgtatttagaaaaataaacaaataggggttccgcgcacatttccccgaaaagtgccacctgacgtctaagaaaccattattatcatgacattaacctataaaaataggcgtatcacgaggccctttcgtc

SEQ ID NO: 199 - DNA, 19924 bp, Homo sapiens
  human beta-casein (CSN2) gene, AF027807.1
gatccaaataaacacaatcaggaatgacaaaggcgacattgccaccaaccccatagaaatattaaaaaaaaccctcagaagcttttatgaacacttgtaagtacacaaattagaaacattagaagaaatggagagattcctagaaaaatatattctcccataattgagccaggaagaaattgaaaccccgaaagaacaataatgagttctgaaattgagtaagtcataaaaaatcttccaaccagaaaaagccctgaagcagatgcatttacaactgaattctgcaagacatataaagaagagctggcaccagtcctactgaaagtattccaaaaagttaaaaaagagggacttgctcataacttattctatgaagccagcatcattttcatccaaaaccaggcagagacacacataaaaaagaaaactttatgccaatacccctgatgaacatagatgcaaaagtcctccataaaatactagcaaagtgaatacagtagcacatcaaaaagctaatccaccatgatcaagtaggctttattattgggatgcaagtttggttcaacataaacaaatcaataaatgtgattcttcacataaacagaaataaaaacataacccatataatcatttcaatagactcataaaaagtgttagataaaattcaatatcctttcatttaaaaaacccttaacaaactaggtatcaaaggtacatatctcaaaatgataagagcaatgtctgacaaacccacagccaacatcataatgaatggccaaaaactggaagcattctccttgcgaaccagaacaagacaaggagatttactcttgtcactcctattcaacatagtattggtagtcatatccagagcaagcagacaaaagaaatataaggcatccaaataggaagaaaggagtcaaattatctttcttctcagatgttatgattctatacttagaaaaaccccatagtctctgcccaaagacttacagatatgataaacaacttcggcaaattttgtttgagttagtttcagaatacaaactcaatgtgtaaatctcagtagcatttatgtacaccaataacatccaatctgagagccaaatcaaggatgcaattccattcacagtcgccacaaaatgaatataataccgagaaatacagctagccaaggaggtaaaagatctctacaatgagaattacaaaacattgctgaaagaactcagcggctacacaaacaaatggaaaaacattccacgctcataggtagaaagaatcaatattgttaaaatggtcatatggcccagagcaatttacagatttgatgctattcctataaaactactaatggtatttttcacagaattagaaaaaaaattctaaaattcatttggaatgataaggaacctgaataaccaaagcaattttaagccaaaagaacaaagctgaaggcatcacactgtgtgacttcaaactatactacaaggctaaagtaatcaacacatcatggtactggtacaaaaacagacatgtagaccaattgaataggttagagaagctggaaataaagccacacacctacaacgaccagatctttgataaagctgacagtaagaagcaatgaggaaaggactttctggttgatcaatggactttctagtcactaaatgataactggctaacaatatgcagaagactgaaactggaccctacttttcaccatgtatagaaattaactcatgttggattaaagacttaaatgtaaaatctaaatctaaaactttaaaaaccccagaagaaaacataggaaacaccactctggacattggcttggcaaagactccaaaaaatctcccaaaacaattgcaaaaaacaaagaaacaaacaaaaaacattgataagtgggacttaatgaaactaaaccgcttctgcacacagaagaaactattgagtaaacagacaacctacagaatgggataaaatatttacaaactttgtacttaacaaaggtctaatatctagaatctataagaaacttaaacaatcaacatgaagaaatgaacgatcccattaaaaatgggcaaaggacatgaacagatacttctcaaaagaagacacacgtgtggccagcaatcatatgaaacaatgctcaacattactaatcattagggaaatgcaaatcaaaaccacaataagttatcatctcacaccagtcagaatggctattgttaaaaagccaaaaaataaccgatgctggtgaggttgtagagaaaatggaatgcttatactctgctggtaggaatgtaaattagttcagaccctgtggaaagcattttggagagttcttaaataacttaaaatatagctccatttaatccggtagtctcattactggctatattcccaaagcaatacaaatcactctgccataaagacatatgcatatgtatgttcattgcagcaatattaataatagcaaagacatggaatcaacctagaagcccatcagtggtggactggataaagaaaatattgtgcagatacaccatataatattaatactatgcagctataaagaagaaatgatatcatgtccttagcagcaacatggatggaactggaggctaccctgagcaaattaatgcagtaacagaaaaccaaatacgacttgttctcacttttttaagtgggagctaaacatcagcaacacatggacacaaagaatggaaaaatagacattatggtttacttgaggctagaggttgggaggagagtgaggattgaaaaacttcctaatgggtattatgctgattaccttggtgaccaaattatctgtatacaaatcctccacaacatgcaatttgcccacataacaaacttgtgcatgtatcccttgaaacttacacaaaagatgaaaaaaaaagaaaaagaaaataaataaaaatcaaggaaaaaaatttacaggcatacctcacagacattgcaggttcacttccagagcaccacaatgaagcaaatatttcaataaatataaataaagaattaacctatctaaaatgtcaatagtgccaaggttaagaaactctggtttaaagtatagtacgtgcttcataaatgtatcctgagcttgaatgaaattttatgattatatggaaaataaaagcagttagtatcaaatgagaagtgtgtgctatgaattagggttatgggctttacgctttcatgatacctgcttcatgaacgtattctctaagctcatatttcttattccatgattcttgattacctttattaattaattttagtagccatatttcagagaagatgtcattgattatattcaaataatctcattgaaggaatgaaaacactgtatctgtataagaaatgctacactatttctctttatataatgatttgttaattacatgtcatatttttcataaatttgaatcattatataaatccccatgatttatttattttattttcctttttccttctatattttgatgaagtttttaaatagtattccaaatattagaagaaagaggtttccagtataaagtctctgtaaattagagataaaatcttgaccaagttatggaactttgcaggtctaaagtttttccttctctaaaataaccttggaatgttacatagacaatatgtagatcctcttccagttattattccttgaacatttgatgtccttttattttaccctttatcctgccttcatatctgcttgctttcttcaaggctttatttacatggctgcagttattatctttacacttcacccacatctcatgcttgcgtatctcatattcgtcacccaatatagaaaagagcattgggtgaacaaattctgttgctaacaaatagtactagaactctttgcattgaatatatctgcttctcgttcagcgctgtcttatcaaatttcagtgggtgcaattcttttttttattatactttaagttctagggtacatgtgcacaacgtgcaggtttgttacatatgtatacatctgccctgttggtgtgctgcacccattaactcgtcatttacattaggtatgtctcctaatgctattcctcccccctcctaattttacctctgaaaataacaattctcttttttttttttttgtgacagagtctcgctctgtcgctcaggtggcgcgatctctgctcactgcaagctccgcctccagggtcactccattctcctgcctcagcctcccaagcagctgggactacaggcgcccaccaccacacccggctaattttttgtattttaagtagagacggggtttcaccgtgttagccaggatggtctcgatctcctgaccttgtgatccgcccgcctcggtctcccaaagtgctgggattacaggcgtgagccacagcgcccagcagaaaataacaattattaaattgttcattgtgaaagcctgggttgccccacatgacattttgcttatttgtcattgggttctgatgcttactgggctcttagcacctggttttatcttaaacctctggcttttcaattttttcttaggcaagcctcttattctagtgctttccttaatcatagttttgcccacttttctgggctaatcaagtctgtaattatactgattagtgtgactaaaaattgatgagcattacaaggatatgttatatttattgcacaatgcataaagcatttttctaagaaaaaacaaatgatatatagaatggacaaggcatgcttgtttttgtattactttcttagaaaccttaactttgttgcctgtggccttggcaactcagagctaaaccacaaagccacattgggtagctagggcctttcctatttggacttaggacgctggagtaatttcatcatttcttttcctggcttcctcctggctcagtatgaacataaaatgaatatcagctgaacaattcaaatgtatagtagacattgacctgggttttctgagaaatatgaaatatatgtgacaatcaggagtgtccccctcattcatagatctaggatgatattaatgcaaggtatattataaagaaaaatagttatgtaggtctatactcagcttatttaatttagaagggcatctatttgtgcttaagtcctgaatatatctgtcataggcagtaaatagaaaaaataaaaattataagaatgagtaacatccaacacagtcagccaaacacttatgaatagcaatcactaaagaggcaaggaaatttgtagacttattttgtaaatgggcacaactcaagtattttgaagcctacctcagtctctactttcgtactttgaccaagaccctgctcttttctgggattcagtattcttttttgcctcaattttctgtactttcataaacattagcaatcaatatttacctactggaaaaccaaaacaaaaacaaagaacgtgagctcaaacttggtcagtttcattttaataaatgtgtacctgtatcatttgttctctaaaaatagccattctctaaatgttactgtccatcttaaattcttcaatagatccctccatctgcagaataaaattcacattcctaaggagcaaagcatgctttgtccatcgtcgtctgattgctttctctttttgtgttcacattttcatcctctctcttccttgaacttcattatccaggttcactacttgatttagttctagttacttgtttctcatatccaagactacagtctttaactatttttagctagaattctctatcctcctcgattaactgctttatctggcttcaagattctgctcaggactcatggcctcatggagattctattttcctctcccatgaatcaactaaaatgaactaagtattctccttctgtcaattgcaccttcttactgctttattagcatattccttacatgtcgtaacaagtagatttttatgtctgttttcccacgaaggttttgacctccttgaggtcaaatgtatcttttatttttcatttcattctggataatttaggaaatgcctgcaaacatagatatttaatatgaaatacattttcctctaacaaactttatgttcacctattttcagcattctgaatgtatggctattccttggactagtcatcatacagaaattctcttctttctaatgctgaaattcccaaatgaaaaaatctctgtttttgtacttctcaaaattggtctcttcttaggccaggtctttgcctttcttgccatctctagtcattcaagccctctttttagtatgttagcttaaacaatacctgatggtttgccatttttaacacaaacactaataatcccaaccctatcctaacaattctcttaacctattgatactaaatctccaccatcttgccatacaactacttagataaaaaaatctgatatataatctcatataagtcataattattgctcgtggatttgttattcattttcattttcacattaaccaaaaatttctgctctttcaaaattacatatatttaagatgtacaacatgatgttttgatacttatatagtgaaatgattactgtagtcaagcaaattaatatgtccatcacctcacataggttactctttttatcttgtggtaagaacatctaaaatctactttcagcaaatttttattatacaataaaatattaatgattatcatcctcacactgtacattacatgtctaaacttattcatcctacataactgcagctttgtttcctttgacctacatctccttatctatcttccaccctgaacccctgatacccatccttctacctctttgtttctatatattcaatttttaaaacaagattccacatataaataacattgtgtaatattcgtccttctgtatctggcttagttgacttaaagattcaactatgtataaccatgtccttcaatttcagttgagaacgccccctttcacctcactagaacattaagaccatttaacttcaacttctctaccttttatctcaaacatgtattatatctacttatcttcttattcctttttgttttcttaggaaaactggtacattttttataggtcttattcttttctccatgactgtacaggaacttgttcattactttactcccacttctttggtatgtttcaactctttccttattggcctctttcttgtaagctacaagtcttccttaccctaaaaataccttcccgtggttctgattatccctgtacacctagtcacaatcttacagttctccttatctcctcttctaagtttctcagaagggcagtacacatgttacttttaattcctcacaaattacttacttcttaaccatttggagtgtatctcaatcagctgtgtagcatttcactgttgacctcacttgccttcctctagcaatgcaggatatcaaggagaggaagtggattctgtactctcttattcttgatatcgcaggttttttttttcctatttccttttgctataccagcccctgtaaaagaaaggatacttgaattttgttttgtacaatttcttttctcacttgatactctttccctagagaccttcacttactcctttgaagggagaaattacctttaaaaattatactcatgattatttcttgagtatcacatttaatttaaaacatcttctggacaccttcaaatttaccacgtacaaggttttactcagtgtttcatttctaatttcagcctggtttcatattttgatttataacatggctaacttttcagtcactcaggcataatatattaattcatttccccaatttttcacatttctcatattttaatgagaagtttgtctttttattgcctaagatgcccaggaccatttccctacttgagatcatcataatgtctgtcttaggctactgcaataacataacataacaacttcctttactaggttacctgatttgttgtcataaagtcatgaaatccaagaaattttacaatccatttttctttaaatctctaatatatttgcttccactgaattatgtcacagtgcatgcctgacattcacagtcatccatgatctgattctatcaaacctctgcaattgtaacttgcaatgtatgccctctgaatatcctcaaactggtatgttgctctttcagttcctgtgttttcttcagccaaaatatctatccccatttaatcatctcgcaaaattctactcattctctaaggctcaactaaaagagcagttccttaatggcaagctcccctgccacacacagcacagaggccctacttttccaattcaggcataattaaattgtacatatttcaaccaaatgctacattgatagataaattttataaaaaattatcagaaggttaaaacatgggctctgagactcacatgtgatcaaacagaatcacatgtagtcagacagatctgagtccaactggtatctttgccattaacaatatggttttgagcaagttacttaaccttttggcatctctgttttctcaacctaaatatgaagaggagagctacctcatgatgttcttgtgcagattatacaagataatatctttgcttagtgcttggcaaagggttagaactaagcaaaaaaacccatcattaatattatcataattatgcttgacctgaaaagagataatcaatattaaaaggtaaataaaactccgtgatactttgcaaaatttttattacagatttactgaggattttgcctatacaagccacccagattccctcttcaagttattccattacagaggaaagtttatttatcttgtgtacaaaatatttgttttaactaaattatttttttttccaaatcaagtggccctgggagaaacagtttgcctcacataactaagctaccatcatggacttgttatcttgtcagtttcttcatttcagcataaagcactaacaactgcttaggttcacatgaaactgtggcctttgtgaagccctgtgtatatctagcgttcacatacaattttcccacaactgaaatctcaagccccactaggccctaaagagacctaattatgtccataataacttgggacagggccagagtatcactgtcctccagtcattgtcttttgttattgaataattgcatttcctggacaggtttcttttatcaacttgtgaattgttcccttgttataatgatgcccagaatttctggggatatgtaataggcagaaatcattttctaatcatgtggacttcttggaattaaagctcgctattgatcttatttcaaatcacaaaattagtgtgtcattaaatatagtatataaacagtcacagaagctgatggaccatcatccatccagcactaccttcacttctcttcaatcttggaaaaacggtaagaattttagatacaaatttgttgtatcttctcctaaccatgtatttcaaagtagcttgagctatagaaggaacgtagttacttaaaatatagtgtttgaaataaaagtatttaaggtagtactgagattatttttaacacttaggctaaaaaagatagaagtgcccagaagaatttggtaaaaaaaattgcaatgacatatagccttcatgagtttaagaaaatataatagctaattttatgcatatatatatatatatatatatatagtatgaggctagttcatagttaatattaaaaggagattcatttttttaattaatcttccaatttgatttagcatatcacagttataaaaagaattatacttcaattatagtatgggtagataaataattactggaaaagctttgtccagcaggtagtttacagcagtagcatactgagttgagaaatggagggaatggtatgggggcatttactactttaaatgtttataaacaatgtttttagaagagtttactcatcaaacttgtctagagcctcaaacttcccagtttattatctagtttgtaatatttcaaaacaatattaaaatgagacagaaatacagaattaagtaaaaaagaaacaatgtggtttactttgtaagaaaattcttaatggggtagaaaagacttggaaaccataaacaaagataatagatgatataaaagaaaaagtagcttagagtgtaccagttgataatgaagctctggcttaaaaattagtatataaaagtatactagtatgtagtatatttatagtatagaaatgagtataaaaactagtataattagtattagtatatattagtatattagtatataaattagcattgtaattatacattcgtatataaaattattatatatattagtagattagtaataaaactagtaaagtttatattacttataaaatatagaaaatgctgtgggatcttccctatgtgtaattatatataatagagtgttatattctgtttctgaaccctgacataaaaatttgggaacttatagtggtcttaggcaaagtaaaattaataaaaacttaattaacattcataaaaaatctagaaaaaatatttgttttctgtaatagaattatgttcaaccttcaaatattgaaaagaacatctctcaaataaattaaagacttttttgatgaagtattttagttcaaaaatttagttcaaaaattgagtttcaatatctgagaatgaagatttgagtggcgagtaatattgtggcacaaacattattttgaaataaattacaaaaaaatgtaagaacacataacaaggagatgatttagtatattttggtcaaaaatattaacatatatttcacaagaagaggtagtcccaagcttagcagtgggcaagaggctctgaccccttggcggatcatcaagagaatcgtgtgtacatttcaataaagagaagagaagaagcctagtgtacaatatctaaagtcatgtggcataaaggagaacagacattattagctatgtggggaagatgaatataaacggagaagaaacaaactcaatagtccaataaagtctctggatagtgacacaaataaggaaagtgttaaaatgaaaacctcagtcttattggaaatgaggagaaataaactaaaatagtcatggtaaccgtttagtgaaaagaaaaaaggtaaaaataaaatgtgacttttttgtacacattttcttgatcagtctcttccagtagaactgaggctccatgagggagtaatatcaggactgtaatattttgttcattgctgcggtcctggtccctagacagtgtctggcaagaacagattctaaagaaatatttttaagttaatgaataaatctttttttaaattttatttgtctttttaaattattattattatactttaagttttagggtacatgtgcacaaagtgcaggtttgttacatatgtatacatgtgccatgttggtgtgctgcacccattaacacgtcatttaacattaggtatatctcctaatgctatccctccccactccccccaccccacaacagccccggtgtgtgatgttccccttcctgtgtccgtgtgttcccattgttcaattcccacctatgagtgagaacatgtggtgtttggtttttttgtccttgcgatagtttgctgagaatgatggtttccagcttcatccatgtccctacaaaggacatgaactcatcattttttatggctgcatagtattccatggtgtatatgtgccacattttcttaatccagtctatcattgttggacatttgggttggttccaagtctttgctattgtgaatagtgccgcaataaacatacatgtgtatgtgtctttatagcagcatgatttataatcctttgggtatatacccagtaatggatggctaggtcaaatggtatcctagctctagatccctgaggaatcgccacactgacttccacaatggttgaactagtttacagtcccaccaacagtgtaaaagtgttcctatttctccacatcctctccagcacctgttgtttcctgactttttaatgatcgccattctaactggtgtgagatggtatctcattgtggttttgatttgcatttctctgatggccagtgatgatgagcattttttcatgtgatttttggctgtataaatgtcttcttttgagaagtgtttgttcatatcctttgcccactttttgatggggttgtttgttttttcttgtaaatttgtttgagttcattgtagattctggatattagccctttgtcagatgagtagattgcaaaaattttctctcattctgcaggttgcctgttcactctgatggtagtttcttttgctgtgcagaagttctttagtttaattagatcccatttgtcaattttggcttttgttgccattgcttttggtcttttacacatgaagtccttgcccatgcctatgtcctgaatggtattgcctaggttttcttctagggtttttatggttttaggtctgacatgtaagtctttaatccaccttgaattaatttttgtataaggtgtaaggaagggacccggtttcagctttctacatatggctagccagttttcccagcaccatttattaaatagggaatcctttccccattgcttgtttttgtcagctttgtcaaagatcagatagttgtagacatgcggcattatttctgagggctctttcctgttccattggtcttggtatcagttttggtaccaagtaccatgctgttttggttactgtagccttgtagtatagtttgaagtcaggtagcatgatgcctccagctttgttcttttggcttaggatttacttggcaatgtggcctcttttttggttccatatgaactttaaagtagtttttttcaattctgtgaagaaagtcattggtagcttaatggggatggcattgaatctataaattaccttgggcagtatggccattttcatgatattgattcttcctacccatgagcatggaatgttcttccatttgtttgtatcctcttttatttcattgagcagtggtttgtagttctccttggagaggtccttctcatcccttgtaagttggattcctagggattttattctctttgaagcaattttgaatgggagttcactcatgatttggctctctgtttgtctgttattggtgtatatgaatgcttgtgatttttgcacattgattttgtatcctgagactttgctgaagttgcttatcagcttaaggagactttgggctgagacgatggggttttctagatacacagtcatgtcatctgcaaacagggacaatttgacttcctcttttcctaattgaatgacctttatttccttctcctgcctaattgccctggccagaacttccaacactatgttgaataggagtggtgagagagggcatccctgtcttgtgccaatttttaacgggaatgcttccagtttttgtccattcagtatgatattggctgtgggtttgtcatagatagctcttattattttgagatatgtcccatcaatacctaaattattgagagtttttagcatgaagtgttgttgaattttgtcaaaggccttttctgcatctattgagataatcatgtggtttttgtctttggttttgtttatatgctggattacgtttattgattttcgtatgttgaaccagccttgcatcccagggatgaagcccacttgatcatggtggataagctttttgatgtgttgcataaatctttccatacatatttataacttctttatgccttttgaaaaattcaatactgtaaatgggacttttttaaaagtggggatagagttgttagctgaaaaatctgaatagctggcaatgaagtttggaatttgaaaaatgagaatcgcaagccagaatggattttgacctccttcatgtgatataacttctatttagtatttattctatttattttctaaatgcagatatttttgttatatattatctctcttttttttttgttttataaaaagtaaccttacctacataagaaagtatatccaattgaccaatcttccaccattccattttttctacattcacaggacttagtagccatgaaggtcctcatcctcgcctgcctggtggctcttgctcttgcaagggaggtatgtgcacaagaaaaaattcctaaacaatcaataaatagtggactatatgcttatttgtagagaataacatcaccaacattttttactgtataaataatgaagaatttcatgagaattctcttggcttctatcaaaatcatttatatttacccactgtctcaacagtttcctatagtgccccaaatgcttcctgcaccaatgtgctgctagtcactaaagaaagagcaaacaaatcaataagtaataaaaaatcataaaaatggcaacgaaatataatattgcataaatacaactccaaagattctcaagctagataaatatatcttattccagtgataaaatgtatatataccttacagcctagggcactgggtcaaatcctgtgtctgtctgtacaaagacatccatgggatgaagtacagagacaatcataatcatgatcataaatatattaataataatataataaaaatatttaatacaaattaaagtgactcttcttttacccataaaaaactctgtctttaataaatgtaagataaaaatatattaatagattactaaatataaaagacattaaagtaattaccttttaaacctcaaaagtcatataacattttttatttctcaaatttgtgaaagagatagctctgcataagtgatgtaaaaattaagtaggatgcatgtttaacaatgagttagctatagaagttgaatttttaaacaccttttcagaaggaacaatccaatgcatcctctgaggtgagattatttttttagagaaaatttatgaaccataaaatagtaaaattctctaatgatctagaagatttagctggttgtcaatttttttttcccacagaccatagaaagcctttcaagcagtgaggtaagttaacattctacccaattttagaacagtaaaatcctgtgctatttttctatggtgttacatcatggcagttaagctaatgcagctatgttaatgacatataagttctagtacatatttcttttatgtgtgtttaaggacaataagtatctggataatacaacattctagaactttgtaaattggcttgctacttgaaattgtgttattttgcttcttttttttttaatgaaccatattgtcctgttttctgccttgaactctctttactctgaacttattcaccttaagcatatactgacggccttctatgggtcagacattgactaggagctgtggtacaaactgaaaagttagagatgccagtgatagttaagagcttgctaagtagtaggtaggcagacgtgcaaaaaggacacattttataattacaatagccactttagtaaataagcgagatttagtgtagtcctaaatttacctgagagagtcaggtagatatttattcttacaccactcttcttgggtgtgtgatcacttgataagtaaatggtacatcaatagattctgtctcttcagaaaggttatatgatccttaagggaagtgtttaactcttatgattcatttgaagtgatcataatgtatcaattgttattagaatatattttcaatgagtatttctttttttaaaaatcagatggggttttagatatcatttgttgtcagggaatgagcatggtggtagagagaaaattagcatctattaattgcttttttttgtaccatgtccttcttgactgcattcatctgactttcttttacataaccagctcatatagaacagtttaatacataagtttaatgattatacaaagttattgatgatattatcaaagaattaatgcctttatttcctgatttatattgcaaagtaagaattgttaaaactaaacctaattttatatttttctgtaggaatctattacagaatacaaggtaaattttcacatttaaaatgtacacattttcaaaatttcctccttttaatctttacagatggtaacatatctttatatatgatatatctttagcagaaagttgagaaggttaaacatgaggaccagcagcaaggagaggtaatttgttaatgataagtatatgtttaaaattattataaagtataatacatacaaaaatatttataatgtgtatgttgattctaaagaatgataataaaataaatgccatatacccaccaaccactttaaaaattaaacattgataaagtcaatatattttctaggatatgcatgcatttttaaactcataattaatttctagaatacagactaaatacataatgatattactaatggtatatctgttttcaacaagtacacattggtgggaacatttccaggttgggaactatgatcctcttatttccaaggtggatatggtaatgaaaaggtgtatacggctggtaaaaaaacctatgtaaaatttgtcccatattgcctttattcccatatggacaacacaaaatcctgtatttcattaaattacatttatggtgatatgtttacccaattataattttcaattgctttgtgtaccaatgaattgtttggagtcacataaaatatttctaaaatcaaatttaaacaaaaaaattgatgtctcttgaaagactgaagagactatcttctccaagggaaggaatgtaagaatttggccggtgttaaattacttcctgagattagccacaaattaagactgattttctttttcatcaaaccaaaacaaaacaaaaataaaccttggaattgtccctctaagtctttttaaactgagtctcttttcactgtatgaaaacaatttggtctactattggcacaactgtgttgaaaagtaaattctctctgaagaccaaagtgtacagctacagctatccaggcaattcaggaaaatgttaaaaaaagtgtttctgaaatatccaaacattgatttcactttggcctgtggagttacccatgaagtgagtggattaaaatttttcaacaaacagtttactcatttttcttcgcatgactcaagatactttcttaaccaaaataagtgaaatattttctcctctctttttactcatttatcattgtctaaaagagagaaatgaattcattatgaatggcaattatagcttaatcaaggactcaaagattctttttccttctttccaggatgaacaccaggataaaatctacccctctttccagccacagcctctgatctatccattcgttgaacctatcccctatggttttcttccacaaaacattctgcctcttgctcagcctgctgtggtgctgcctgtccctcagcctgaaataatggaagtccctaaagctaaagacactgtctacactaagggcagagtgatgcctgtccttaaatctccaacgatacccttttttgaccctcaaatcccaaaactcactgatcttgaaaatctgcatcttcctctgcctctgctccagcccttgatgcagcaggtccctcagcctattcctcagactcttgcacttccccctcagcccctgtggtctgttcctcagcccaaagtcctgcctatcccccagcaagtggtgccctaccctcagagagctgtgcctgttcaagcccttctgctcaaccaagaacttctacttaaccccacccaccagatctaccctgtgactcagccacttgccccagttcataaccccattagtgtaagtccaaatttactggctttgctgtttcattcaagatgtgtatgtgatggtagaataaaagaataaatgtagagtaaatgaattaaaaaaacagtttagataagtgattcttttattattatactttaagttttagggtacatgtgcacaacatgcaggttagttacatatgtatacatgtgccatgttggtgtgctgcacccattaactcgtcatttaacattcggtatatctcctaatgctatcccatcccccatcccccaccccacgacaggtccaggtgtgtgatgttccccttcctgtgtccatgtgttctcatagataagtgattcttaatgcttacctatacaatagaatcacctggagaacttttccccacaaatcccaatgcctaagcttacccagagattctgatataattgttctagttttttgtgtagaggaaactgagtgttgagaaaaaaactattgcatgaattctggtttaattagtctgttgagaattctgatttagataaagtaattaaggcttacaaaagccggaattaaatttaataatatgattgaatttggaaaaaaaagctaaaaaatgttctgtcattttccttgtgcacatctcttttacacaagccttacttcacatcttgtttttgctataagtatatatgaaggcaaaagactgagatgcttatttcactacttacaacattcttaaggcaagttttcttactaagaggttatttatttatttatttatttatttattttacacaagccttacttcacatctggtttttgctgtaaatatatatgaaggcaaaagacggagatgcttatttcactacttacaacattcttaaggcaagttttcttactaagaggttatttatttatttgtatctgtttatttttaaggtctaagaagatttcaaagttaattttccctccttatttttggtaagttttgggagtttggagatttaattgatcatttttatacatgatgtctttttacatttaattctcctagagaagtccaatacagtgaaaatttcatacatacaagaactttttttattaattatcaatttaatggttgactatcatttactgacctgaaactatctatcttttgcatttcaaataactttaattttatttatgtactattgacagatttgactggcttgctttcaagggcctatatacttacatttgattatcactatttttaggaaagacagaatatatacttattttacttttatggaaatatatttgagcttttgtcaaaagcctatttgcatttttatttctaacctagccttcataaaatttgtatttactttacttaaaattatcttttaattcatgagttaaaattactccaagtgtaaaggttaaaaagaggagagaacagcattgcaattctaagatataaagccttttgggattatgaaataccagacatttcactgaaacaatttcaagttcactaatatttgatgaactttggtgaagtttggtgaacaaactttacatgcctccaaaccgcaacagaatgcatttgcaatacaatttcttttgtgaattagtcacaccaaagttaaaagtgaagagagttgaatagttacgtgttataacataactaattatatatttgctctctattccacagaattgactgagactggaaatatgatgccttttccgtctttgtatcacgttaccccaaattaagtatgtttgaatgagtttatatggaaaaaatgaactttgtccctttatttattttatatattatgtcattcatttaatttgaaatttgactcatgaactatttacattttccaaatcttaattcaactagtaccacagaagttcaatactcatttggaaatgctacaaacatatcaaacatatgtatacaaattgtttctggaattgtgcttatttttatttccttaagaatctatttcctttccagtcatttcaataaattattcttaagcatatttcagttcttctgtctttttttcaaacctaatcggcctctttaatgttaactttgatttattattgat

SEQ ID NO: 200 - DNA, 30 bp, Artificial Sequence
  primer Acb583
ccacagaattgactgcgactggaaatatgg

SEQ ID NO: 201 - DNA, 30 bp, Artificial Sequence
  primer Acb601
ctccatgggtaagcctaaacattgagatct

SEQ ID NO: 202 - DNA, 28 bp, Artificial Sequence
  primer Acb620
ctttctcagcccaaagttctgcctgttc

SEQ ID NO: 203 - DNA, 28 bp, Artificial Sequence
  primer Acb621
caagttctctctcatctcctgcttctca

SEQ ID NO: 204 - DNA, 28 bp, Artificial Sequence
  primer Acb618
cagtggacagaggaagagtcagaggaag

SEQ ID NO: 205 - DNA, 28 bp, Artificial Sequence
  primer Acb619
gtatttacctctcttgcaagggccagag

SEQ ID NO: 206 - DNA, 44 bp, Artificial Sequence
  Insulator-p1
ttttgcggccgctctagactcgaggggacagcccccccccaaag

SEQ ID NO: 207 - DNA, 48 bp, Artificial Sequence
  Insulator-p2
ttttggatccgtcgacgccccatcctcactgactccgtcctggagttg

SEQ ID NO: 208 - DNA, 2416 bp, Homo sapiens
  human butyrylcholinesterase Accession: J02964
tactgaatgtcagtgcagtccaatttacaggctggagcagcagctgcatcctgcatttccccgaagtattacatgattttcactccttgcaaactttaccatctttgttgcagagaatcggaaatcaatatgcatagcaaagtcacaatcatatgcatcagatttctcttttggtttcttttgctctgcatgcttattgggaagtcacatactgaagatgacatcataattgcaacaaagaatggaaaagtcagagggatgaacttgacagtttttggtggcacggtaacagcctttcttggaattccctatgcacagccacctcttggtagacttcgattcaaaaagccacagtctctgaccaagtggtctgatatttggaatgccacaaaatatgcaaattcttgctgtcagaacatagatcaaagttttccaggcttccatggatcagagatgtggaacccaaacactgacctcagtgaagactgtttatatctaaatgtatggattccagcacctaaaccaaaaaatgccactgtattgatatggatttatggtggtggttttcaaactggaacatcatctttacatgtttatgatggcaagtttctggctcgggttgaaagagttattgtagtgtcaatgaactatagggtgggtgccctaggattcttagctttgccaggaaatcctgaggctccagggaacatgggtttatttgatcaacagttggctcttcagtgggttcaaaaaaatatagcagcctttggtggaaatcctaaaagtgtaactctctttggagaaagtgcaggagcagcttcagttagcctgcatttgctttctcctggaagccattcattgttcaccagagccattctgcaaagtggatcctttaatgctccttgggcggtaacatctctttatgaagctaggaacagaacgttgaacttagctaaattgactggttgctctagagagaatgagactgaaataatcaagtgtcttagaaataaagatccccaagaaattcttctgaatgaagcatttgttgtcccctatgggactcctttgtcagtaaactttggtccgaccgtggatggtgattttctcactgacatgccagacatattacttgaacttggacaatttaaaaaaacccagattttggtgggtgttaataaagatgaagggacagcttttttagtctatggtgctcctggcttcagcaaagataacaatagtatcataactagaaaagaatttcaggaaggtttaaaaatattttttccaggagtgagtgagtttggaaaggaatccatcctttttcattacacagactgggtagatgatcagagacctgaaaactaccgtgaggccttgggtgatgttgttggggattataatttcatatgccctgccttggagttcaccaagaagttctcagaatggggaaataatgcctttttctactattttgaacaccgatcctccaaacttccgtggccagaatggatgggagtgatgcatggctatgaaattgaatttgtctttggtttacctctggaaagaagagataattacacaaaagccgaggaaattttgagtagatccatagtgaaacggtgggcaaattttgcaaaatatgggaatccaaatgagactcagaacaatagcacaagctggcctgtcttcaaaagcactgaacaaaaatatctaaccttgaatacagagtcaacaagaataatgacgaaactacgtgctcaacaatgtcgattctggacatcattttttccaaaagtcttggaaatgacaggaaatattgatgaagcagaatgggagtggaaagcaggattccatcgctggaacaattacatgatggactggaaaaatcaatttaacgattacactagcaagaaagaaagttgtgtgggtctctaattaatagatttaccctttatagaacatattttcctttagatcaaggcaaaaatatcaggagcttttttacacacctactaaaaaagttattatgtagctgaaacaaaaatgccagaaggataatattgattcctcacatctttaacttagtattttacctagcatttcaaaacccaaatggctagaacatgtttaattaaatttcacaatataaagttctacagttaattatgtgcatattaaaacaatggcctggttcaatttctttctttccttaataaatttaagttttttccccccaaaattatcagtgctctgcttttagtcacgtgtattttcattaccactcgtaaaaaggtatcttttttaaatgaattaaatattgaaacactgtacaccatagtttacaatattatgtttcctaattaaaataagaattgaatgtcaatatgagatattaaaataagcacagaaaatc

SEQ ID NO: 209 - DNA, 77 bp, Artificial Sequence
  primer Acb719
atattctcgagagccatgaaggtcctcatccttgcctgtctggtggctctggcccttgcaagagaagatgacatcat

SEQ ID NO: 210 - DNA, 40 bp, Artificial Sequence
  primer Acb718
ctatgactcgaggcgatcgctattaattagagacccacac

SEQ ID NO: 211 - DNA, 3015 bp, Artificial Sequence
  pGEM-T easy vector
gggcgaattgggcccgacgtcgcatgctcccggccgccatggcggccgcgggaattcgatatcactagtgaattcgcggccgcctgcaggtcgaccatatgggagagctcccaacgcgttggatgcatagcttgagtattctatagtgtcacctaaatagcttggcgtaatcatggtcatagctgtttcctgtgtgaaattgttatccgctcacaattccacacaacatacgagccggaagcataaagtgtaaagcctggggtgcctaatgagtgagctaactcacattaattgcgttgcgctcactgcccgctttccagtcgggaaacctgtcgtgccagctgcattaatgaatcggccaacgcgcggggagaggcggtttgcgtattgggcgctcttccgcttcctcgctcactgactcgctgcgctcggtcgttcggctgcggcgagcggtatcagctcactcaaaggcggtaatacggttatccacagaatcaggggataacgcaggaaagaacatgtgagcaaaaggccagcaaaaggccaggaaccgtaaaaaggccgcgttgctggcgtttttccataggctccgcccccctgacgagcatcacaaaaatcgacgctcaagtcagaggtggcgaaacccgacaggactataaagataccaggcgtttccccctggaagctccctcgtgcgctctcctgttccgaccctgccgcttaccggatacctgtccgcctttctcccttcgggaagcgtggcgctttctcatagctcacgctgtaggtatctcagttcggtgtaggtcgttcgctccaagctgggctgtgtgcacgaaccccccgttcagcccgaccgctgcgccttatccggtaactatcgtcttgagtccaacccggtaagacacgacttatcgccactggcagcagccactggtaacaggattagcagagcgaggtatgtaggcggtgctacagagttcttgaagtggtggcctaactacggctacactagaagaacagtatttggtatctgcgctctgctgaagccagttaccttcggaaaaagagttggtagctcttgatccggcaaacaaaccaccgctggtagcggtggtttttttgtttgcaagcagcagattacgcgcagaaaaaaaggatctcaagaagatcctttgatcttttctacggggtctgacgctcagtggaacgaaaactcacgttaagggattttggtcatgagattatcaaaaaggatcttcacctagatccttttaaattaaaaatgaagttttaaatcaatctaaagtatatatgagtaaacttggtctgacagttaccaatgcttaatcagtgaggcacctatctcagcgatctgtctatttcgttcatccatagttgcctgactccccgtcgtgtagataactacgatacgggagggcttaccatctggccccagtgctgcaatgataccgcgagacccacgctcaccggctccagatttatcagcaataaaccagccagccggaagggccgagcgcagaagtggtcctgcaactttatccgcctccatccagtctattaattgttgccgggaagctagagtaagtagttcgccagttaatagtttgcgcaacgttgttgccattgctacaggcatcgtggtgtcacgctcgtcgtttggtatggcttcattcagctccggttcccaacgatcaaggcgagttacatgatcccccatgttgtgcaaaaaagcggttagctccttcggtcctccgatcgttgtcagaagtaagttggccgcagtgttatcactcatggttatggcagcactgcataattctcttactgtcatgccatccgtaagatgcttttctgtgactggtgagtactcaaccaagtcattctgagaatagtgtatgcggcgaccgagttgctcttgcccggcgtcaatacgggataataccgcgccacatagcagaactttaaaagtgctcatcattggaaaacgttcttcggggcgaaaactctcaaggatcttaccgctgttgagatccagttcgatgtaacccactcgtgcacccaactgatcttcagcatcttttactttcaccagcgtttctgggtgagcaaaaacaggaaggcaaaatgccgcaaaaaagggaataagggcgacacggaaatgttgaatactcatactcttcctttttcaatattattgaagcatttatcagggttattgtctcatgagcggatacatatttgaatgtatttagaaaaataaacaaataggggttccgcgcacatttccccgaaaagtgccacctgatgcggtgtgaaataccgcacagatgcgtaaggagaaaataccgcatcaggaaattgtaagcgttaatattttgttaaaattcgcgttaaatttttgttaaatcagctcattttttaaccaataggccgaaatcggcaaaatcccttataaatcaaaagaatagaccgagatagggttgagtgttgttccagtttggaacaagagtccactattaaagaacgtggactccaacgtcaaagggcgaaaaaccgtctatcagggcgatggcccactacgtgaaccatcaccctaatcaagttttttggggtcgaggtgccgtaaagcactaaatcggaaccctaaagggagcccccgatttagagcttgacggggaaagccggcgaacgtggcgagaaaggaagggaagaaagcgaaaggagcgggcgctagggcgctggcaagtgtagcggtcacgctgcgcgtaaccaccacacccgccgcgcttaatgcgccgctacagggcgcgtccattcgccattcaggctgcgcaactgttgggaagggcgatcggtgcgggcctcttcgctattacgccagctggcgaaagggggatgtgctgcaaggcgattaagttgggtaacgccagggttttcccagtcacgacgttgtaaaacgacggccagtgaattgtaatacgactcactata

SEQ ID NO: 212 - protein, 602 aa, Homo sapiens
  human butyrylcholinesterase, mRNA J02964 translation
  SIGNAL (1)...(28): signal sequence
MHSKVTIICIRFLFWFLLLCMLIGKSHTEDDIIIATKNGKVRGMNLTVFGGTVTAFLGIPYAQPPLGRLRFKKPQSLTKWSDIWNATKYANSCCQNIDQSFPGFHGSEMWNPNTDLSEDCLYLNVWIPAPKPKNATVLIWIYGGGFQTGTSSLHVYDGKFLARVERVIVVSMNYRVGALGFLALPGNPEAPGNMGLFDQQLALQWVQKNIAAFGGNPKSVTLFGESAGAASVSLHLLSPGSHSLFTRAILQSGSFNAPWAVTSLYEARNRTLNLAKLTGCSRENETEIIKCLRNKDPQEILLNEAFVVPYGTPLSVNFGPTVDGDFLTDMPDILLELGQFKKTQILVGVNKDEGTAFLVYGAPGFSKDNNSIITRKEFQEGLKIFFPGVSEFGKESILFHYTDWVDDQRPENYREALGDVVGDYNFICPALEFTKKFSEWGNNAFFYYFEHRSSKLPWPEWMGVMHGYEIEFVFGLPLERRDNYTKAEEILSRSIVKRWANFAKYGNPNETQNNSTSWPVFKSTEQKYLTLNTESTRIMTKLRAQQCRFWTSFFPKVLEMTGNIDEAEWEWKAGFHRWNNYMMDWKNQFNDYTSKKESCVGL

SEQ ID NO: 213 - DNA, 10318 bp, Homo sapiens
  human acetylcholinesterase (YT blood group) (ACHE) gene, complete cds  gi 52352733
tggcgcttccttccaaggtgggagacagagataaaagaggggtagggaaattctctgaattggcagaactggtagtagaagcaaggctcattcctggataaacagaaatggtgagagaagaaatgggaaaaatcaaggacatccctgcagtgacagctgtggagggtggggagtttactatgctagactatgtagggaaacgcctcctggcttgacaggttaggtgcctgtgttgacaacggttgctgagagctcaaggtgaaaagagggatagttccaggaaatgataaccctggtgataaactatccctgccctccctatcttcattgtacaggcctagaaactcgtgacgacagaggttaggtgacacctgcgtggcacagttcgtctggagggtgacaggggcaagccttcatcactagcagggccaaaaatccctaaagcctcaggactggggcaggcctcagagcactcgttcacagtttgtttccatcattttatttttttgcggagaagggagtctcgctatgttgcccaggctagtctccaactcctggactgaagcgatcctcctgtctcggcctcccagagtgctgggattacaggcaccgcactaggggccacacgcggccccatcattttaataattcataattaccacgcttagaaacctgcctcagattcattccccccgcagcaacacccaccatccaccctcctgtcccctcccccatgcacagcccttacatctgctcttcagggatctcaactagggcacatggtctggccagtgaggagccttcaactagtgcggccagaacgctgaaggccggatacaaggagcctcggtgtccaggcaggggatttggggttgcctgagattggggcggggaaagccggagacagtgggcacagatggcgaggggttcacctccccaacacccccaacccagcccagtctccgaggcccgagtggctgctttttgcgccacctggcggccgtctccagcgagcggagcgcgggtgaccgtgcctgcgggacccggttcccgtggggcgagcgggcgtggggcccgcccagcttggagagccgggaaccgcgcggcccagggactggcaagactccggattcaacccctgcgaggccccgcaacccggtgcccgcggtccctggcggcggcgcccgcgtgcccgaggcgctgcggggcgctgcggggcgcgcggcggttagagcgagcgtgtgcgcacgcgcccaccccacgccgcgccccgcaccgccgcgcgcgcgcacgcacgcccgacgctggcctgcgccggccgctctcccacgcggggtctcgggggctcctgagccggccgcctccaggaagcaggcgccgcgcggtattgccgcatgcacctcggtcgtggggaccccgctgcagcagccctgtccacacgggtgaactcctggagggcggggcggggggcaatctgcgcgggtcaggcccctcggagcaggctgggggcgcccgagccaggccgctcccacctgccagccgcgtggccaatgaatgctaggcctggtgatgtcatgccccgaccggaccctggtgacgaaagtccgaagtcacccgtcagggaaccagcacagacccacccgcgggggttccagaagtttccactgccgccgcggagtgcggcctcgcccagcagccttgcgcgtgctaccacgctgtcctgccttctcaggtgtcccaagtcaccccttcctcccccaggggtctcctgtctccatgccctcccacctcatttccactagcgatcccattttacatctccattcccacaggtgtcctttcatccccaggagtgtcccacgtcaccttttctgcacccgtgccacctggacccctaaggggacggtcctctgccacactcccacatgcctctcctcccatgccacccgtctgtgtcgtggccggggatgcatgaccccttggccttgcgctaacttcaccagcctcgagcgagaccgacagggtgtccaagtgtgtccgtccgtctgtgaaagtcgtccctgcgtttgtctgtgcctgtcactgcatgaggtcgtccgtctgcgcgtgtctgtctccacgggcttctgtccgtctgtctgtcacgtgggtgtctactccgccgctgcaggtctttgggtcgcgtctgtcactgcgctctgtcgtcggtcggcgtctggcactggagtgcgtctgggccccggggtctccgggtctcggctccaagggagggagagagaggggaggtggccacccgggagagcggggaggggcgggggcggagacagtgggcgggggcgggcgggggcgctgtgaggcccggagggggtgtgtgcggggggccggaggcggcggctgtcagagtcggctcagcctgcgccggggaacatcggccgcctccagctcccggcgcggcccggcccggcccggctcggccgcctcaggtgagtctccctccccgcccgggactctccttaaggcccgggtccggggcaccgtgcgctccccgaggggtccaggcccccctaacgggacggctcccgcttccccgggcctgccccgcgccgccctccgctgccccgcactcgtccggaactcttccccggccgcctcacactcaccgacgcccacgcaggagcccgagcccgcgggaacggccgccgcctctgcgctccgattcccgcggggacccccgagcaccccttccccgatcgctccctagtccggggccactggaagacaccccctaattggggcggtacccgagctgcgcaggttcccggcgccgggctgggcacccccatccccagggccacaagcccagcgcccctgcgcagcgccccgcagaggccccctccgaggcccaggacgccccctcccgcggagactccatctctattttttgggaaggggaggctcggcggaagccccgagttataattagcgccactcgggtttcctagttaatctccagcagcaccaccaccccccgctcagggcggcgggggctgggctaggagtgaccggcgggagaggggggagttcccacccggggaattttgatcctttggctggagatgccggaaccgtagcagctgctgcccccaaaatagcgcccccgcccctgcagccggggatctccggagtcccgggaacgcaggcgtcccggctcgcccttcaggcggctctgcaaggccctcgagcccccaggccccctccccaagttcccggctcctggctcggggcggggagcgccgaccttttctcggtctctactgccctccgccggcggcggcgtgcacggcagcttcagacggatggggggctctcgagtcctgggggacgcgggctggcgagcctgtttgcttggggctgggctgggagcgtgcgcagctgatgggaacccgcgggcatcagcgctcggtgccagacattggatgagaaggggcagggttgggtggggagtggactaggcaggatttgggggaccccgggacctgaggcttccacaccctgaatgcccagcccaccgccccccagggccccgggtctggccgacccaggagagcggggctgcgccttcaggccgccgcaagctcccccagcggcgctgcccgtccgtgaggccgcgcccctgtcgggtggcctgttcgtggactgaggcttctggtgccctcactgcacgagctgggcccggcccagttccgggaagaggtgagggcagtggacccctgcggagcagagagggtgctcctctctgttccctgcatttgtctggatatgggtgtctgcctgatctctttcccctcctgcccgctggcctgtgtccttgtctctgcctgtctccttccctccctccctctctcccctcatctttgccaacctgccccacctcctctgcagctgagcgataacccttgggccgacagtgccctaatctcctccctcctggcttctcgaccgacccttcaccctttccctttctttctcccagcagacgccgcctgccctgcagccatgaggcccccgcagtgtctgctgcacacgccttccctggcttccccactccttctcctcctcctctggctcctgggtggaggagtgggggctgagggccgggaggatgcagagctgctggtgacggtgcgtgggggccggctgcggggcattcgcctgaagacccccgggggccctgtctctgctttcctgggcatcccctttgcggagccacccatgggaccccgtcgctttctgccaccggagcccaagcagccttggtcaggggtggtagacgctacaaccttccagagtgtctgctaccaatatgtggacaccctatacccaggttttgagggcaccgagatgtggaaccccaaccgtgagctgagcgaggactgcctgtacctcaacgtgtggacaccatacccccggcctacatcccccacccctgtcctcgtctggatctatgggggtggcttctacagtggggcctcctccttggacgtgtacgatggccgcttcttggtacaggccgagaggactgtgctggtgtccatgaactaccgggtgggagcctttggcttcctggccctgccggggagccgagaggccccgggcaatgtgggtctcctggatcagaggctggccctgcagtgggtgcaggagaacgtggcagccttcgggggtgacccgacatcagtgacgctgtttggggagagcgcgggagccgcctcggtgggcatgcacctgctgtccccgcccagccggggcctgttccacagggccgtgctgcagagcggtgcccccaatggaccctgggccacggtgggcatgggagaggcccgtcgcagggccacgcagctggcccaccttgtgggctgtcctccaggcggcactggtgggaatgacacagagctggtagcctgccttcggacacgaccagcgcaggtcctggtgaaccacgaatggcacgtgctgcctcaagaaagcgtcttccggttctccttcgtgcctgtggtagatggagacttcctcagtgacaccccagaggccctcatcaacgcgggagacttccacggcctgcaggtaactagtggctagctggcgtgaagctggctcctctgggtcccaacggtccctcccctccctgcagggacccaggcatgagggcttctccaggcccattcccagaagtcccagaagtcctccctgagggctcagatcccagggtggtcagcagggcagacaggaaagccaccatgggtctattttctctttctctgcatccctcccctgatctcgtcctctctctgtccatggttccgggtctgtaactgttcatctctctggctctttgtctgtccatctgtttctgtctacttgtctgtctgtgcctgtcgctccatcccacccccctctccctcacccccaggtgctggtgggtgtggtgaaggatgagggctcgtattttctggtttacggggccccaggcttcagcaaagacaacgagtctctcatcagccgggccgagttcctggccggggtgcgggtcggggttccccaggtaagtgacctggcagccgaggctgtggtcctgcattacacagactggctgcatcccgaggacccggcacgcctgagggaggccctgagcgatgtggtgggcgaccacaatgtcgtgtgccccgtggcccagctggctgggcgactggctgcccagggtgcccgggtctacgcctacgtctttgaacaccgtgcttccacgctctcctggcccctgtggatgggggtgccccacggctacgagatcgagttcatctttgggatccccctggacccctctcgaaactacacggcagaggagaaaatcttcgcccagcgactgatgcgatactgggccaactttgcccgcacagggtcagcagtgcagagggagagaaggctggggaggacaggagtcgggggcgggaggacacacaaaggcagacacacggagacagaaaggacgggtgggacaggggcaggatagaacagccagagagggatatgctcacaaagtagataaaaggggagagaaaaagaaaggagacagagaaggcagagggggtcttgcagagacagaggcaaaggaaagtgaggaggagacgaggtagacatggagggggcggggcacagtggctcacccctgtaattccagccctttgggaggccaaggtgggaggatcccctgaggccaggagtttgagaccagactggacaacataacaagaccccgactcttaaaaagaaaaaaaatacaaaacttagccaggcacggtggctcgtgcctctagtcccagctacttgggaaggtgaggcaggaggattgcttgagcctgggaggttgaggctgcagtgagctatgatggcaccactgcactccagcctgagtggccctatctctggaaaaaaaaaaaaaaaaaaaaaagggagaccaagacaaaggagttggagctggattaagtcaaaccagtgatgattcactagcagtgacacattctctcacacacacaccagtttacctggatcgagaagaggacaatgaaatctagcattggatgggtgttgttaaaaaatgtgatgtttgtagacataggacccgtcctggttatttaggaaagtctcaagacatcctagccatttttttagtgagagaaacaaagatggaacagaaaagctgagggaaacggaaggagacggagcgcttgaggaagggaagaccccaatgaccgcgcacattggagaaagtggtgggagggaggggacgggttctctggggctctccgctgagctgaagagtccgggatcccgtggagttgggggccacctcctcccactgcccgtctggactgagccttcccttccttccgcagggatcccaatgagccccgagaccccaaggccccacaatggcccccgtacacggcgggggctcagcagtacgttagtctggacctgcggccgctggaggtgcggcgggggctgcgcgcccaggcctgcgccttctggaaccgcttcctccccaaattgctcagcgccaccggtatgcaggggccagcgggcagcggctgggaggaggggagtgggagcccgccaggtgtaacccctctcttctccccctagcctcggaggctcccagcacctgcccaggcttcacccatggggaggctgctccgaggcccggcctccccctgcccctcctcctcctccaccagcttctcctcctcttcctctcccacctccggcggctgtgaacacggcctcttcccctacggccacaggggcccctcctctaatgagtggtcggaccgtggggaagggccccactcagggatctcagacctagtgctcccttcctcctcaaaccgagagactcacactggacagggcaggaggagggggccgtgcctcccacccttctcagggacccccacgcctttgttgtttgaatggaaatggaaaagccagtattcttttataaaattatcttttggaacctgagcctgacattggggggaagtgggaggccccggacggggtagcaccccccattggggctataacggtcaaccatttctgtctcttctttttcccccaacctccccctcctgtcccctctgttcccgtcttccggtcattcttttctcctcctctctccttcctgctgtccttctccggccccgcctctgccctcatcctccctctcgtctttcgcacattctcctgatcctcttgccaccgtcccacgtggtcgcctgcatttctccgtgcgtcctccctgcactcatacccccccttcaacccgcccaaatgtccgatccccgaccttcctcgtgccgtcctcccctcccgcctcgctgggcgccctggccgcagacacgctcgacgaggcggagcgccagtggaaggccgagttccaccgctggagctcctacatggtgcactggaagaaccagttcgaccactacagcaagcaggatcgctgctcagacctgtgaccccggcgggacccccatgtcctccgctccgcccggccccctagctgtatatactatttatttcagggctgggctataacacagacgagccccagactctgcccatccccaccccaccccgacgtcccccggggctcccggtcctctgcatgtctcaggctgagctccctcccccgcggtgccttcgcccctctgggctgccaataaactgttacagccacgggagtgtgcgcgactagggagccaggggtagaggcagaacgccggaatcacgggggccgagtctatgcaggagcggggctggagggcaagaaacaggcgagctccgaggcgggcgcaaggcaaaggccaacccctagccctgccctgccgggcggagctcgcgcctgcgtaatgaggcccgcaggcaggctagctggcacggcggaggggaggagaggggaggggaggggaggggaggggaggggaggggcggggcggggcggggcgcggcggagcattgtgggagctcctcggtcggtgccggtcggtggctgcctattgcggcctgcggtgatcaacgaggcccggggagcgcgtccccagtctgcgcgccggtcctgcggcagctggcccaagacccggagccgaaaggaagtgttggagcctgaggtcgctccgcgccgctaggaggacgctgtgcctggcctgggacctccgctcccgcccaccgccctggagccgctgagggacgtccacgtgggcctgtccccgccgagccgcggccctgtccgcctggcgctgctctcgggccactacctctactaccactacggctgcgacggcctggacgaccgcggctggggctgcggctaccgcactctgcagacgctgtgctcgtggccagagggccagcccgcgggcgtacctggactggccgccgtacaggcggccctggaggacatgggcgacaagccccccggcttccggggctcccgggactggatcggctgcgtggaggccagcctctgcctcgctcacttcggagggccccagggacgcctctgccacgtaccccggggagtggggctgcacggggagctggagaggctttactcgcacttcgcagggggtgggggcccagtcatggttgggggggacgcagatgccaggtccaaggccttgctgggagtctgcgtcgggtcaggcacggaagcctatgtcctggtattggaccctcactactggggcactccaaaaagccccagtgaactacaggctgctgggtgggtgggctggcaagaggtgagtgcagcctttgaccccaactccttctacaacctgtgcttgaccagccttagctcccaacagcagcagcgcaccttggactgaggacgaagttacagaactgagattctcgggtcccagacacgcacctatgtacctcccactggtgtccctgcaaagcctggcgcttttgacatcaataataaaagtggcagggctgagcaacacctcaggagttactctggaaggatggaggagttatgtaacacacgagagtcaggagccctgtggaagtgcttttattagcagtaaggctgatcgtacaaaaaattctcagagcttcataggacaaggtagtacaagtatggatgatacaggactgaggaacgggggacggctcaaaagaaatcaacatcgtctggggcatccaggtcccgatattccacaatggcccttgggtctccacgaaccatcctgtgaggtgagaggtacaggatgagagctgagggctcccaaaagggagtctgcaggcggcaacaaagcttgggcgtctgccctcctcacctgttgcgaggtttcccaggataacctccctggcctcggaaggcatcatagttccctcgaccagcaccatacggggcatgggggtatggagggcctcctgtggggactgcagggcggacagcaccagctatgacagagatcagtgttgagttgcaaaactatgtcctcaattccatcctctgttttcttctcccaaagccacacactcaccaagccccttcatctccctcctgtacttacctccatagcccaagatcgggggccggggctgaccatagggcatcaggccctggggagtctggtgtgggtaggggagtcctggggtcaaacctggggggagtacaacacggacagggacatgaattactgcgggggcggggagggggatacgggtacaattgacttctagggct

SEQ ID NO: 214 - protein, 614 aa, Homo sapiens
  human acetylcholinesterase precursor P22303 (isoform T)
  SIGNAL (1)...(31): signal sequence
MRPPQCLLHTPSLASPLLLLLLWLLGGGVGAEGREDAELLVTVRGGRLRGIRLKTPGGPVSAFLGIPFAEPPMGPRRFLPPEPKQPWSGVVDATTFQSVCYQYVDTLYPGFEGTEMWNPNRELSEDCLYLNVWTPYPRPTSPTPVLVWIYGGGFYSGASSLDVYDGRFLVQAERTVLVSMNYRVGAFGFLALPGSREAPGNVGLLDQRLALQWVQENVAAFGGDPTSVTLFGESAGAASVGMHLLSPPSRGLFHRAVLQSGAPNGPWATVGMGEARRRATQLAHLVGCPPGGTGGNDTELVACLRTRPAQVLVNHEWHVLPQESVFRFSFVPVVDGDFLSDTPEALINAGDFHGLQVLVGVVKDEGSYFLVYGAPGFSKDNESLISRAEFLAGVRVGVPQVSDLAAEAVVLHYTDWLHPEDPARLREALSDVVGDHNVVCPVAQLAGRLAAQGARVYAYVFEHRASTLSWPLWMGVPHGYEIEFIFGIPLDPSRNYTAEEKIFAQRLMRYWANFARTGDPNEPRDPKAPQWPPYTAGAQQYVSLDLRPLEVRRGLRAQACAFWNRFLPKLLSATDTLDEAERQWKAEFHRWSSYMVHWKNQFDHYSKQDRCSDL

SEQ ID NO: 215 - protein, 583 aa, Homo sapiens
  human acetylcholinesterase mature P22303 (isoform T)
EGREDAELLVTVRGGRLRGIRLKTPGGPVSAFLGIPFAEPPMGPRRFLPPEPKQPWSGVVDATTFQSVCYQYVDTLYPGFEGTEMWNPNRELSEDCLYLNVWTPYPRPTSPTPVLVWIYGGGFYSGASSLDVYDGRFLVQAERTVLVSMNYRVGAFGFLALPGSREAPGNVGLLDQRLALQWVQENVAAFGGDPTSVTLFGESAGAASVGMHLLSPPSRGLFHRAVLQSGAPNGPWATVGMGEARRRATQLAHLVGCPPGGTGGNDTELVACLRTRPAQVLVNHEWHVLPQESVFRFSFVPVVDGDFLSDTPEALINAGDFHGLQVLVGVVKDEGSYFLVYGAPGFSKDNESLISRAEFLAGVRVGVPQVSDLAAEAVVLHYTDWLHPEDPARLREALSDVVGDHNVVCPVAQLAGRLAAQGARVYAYVFEHRASTLSWPLWMGVPHGYEIEFIFGIPLDPSRNYTAEEKIFAQRLMRYWANFARTGDPNEPRDPKAPQWPPYTAGAQQYVSLDLRPLEVRRGLRAQACAFWNRFLPKLLSATDTLDEAERQWKAEFHRWSSYMVHWKNQFDHYSKQDRCSDL

SEQ ID NO: 216 - protein, 617 aa, Homo sapiens
  human acetylcholinesterase isoform H precursor
  SIGNAL (1)...(31): signal sequence
MRPPQCLLHTPSLASPLLLLLLWLLGGGVGAEGREDAELLVTVRGGRLRGIRLKTPGGPVSAFLGIPFAEPPMGPRRFLPPEPKQPWSGVVDATTFQSVCYQYVDTLYPGFEGTEMWNPNRELSEDCLYLNVWTPYPRPTSPTPVLVWIYGGGFYSGASSLDVYDGRFLVQAERTVLVSMNYRVGAFGFLALPGSREAPGNVGLLDQRLALQWVQENVAAFGGDPTSVTLFGESAGAASVGMHLLSPPSRGLFHRAVLQSGAPNGPWATVGMGEARRRATQLAHLVGCPPGGTGGNDTELVACLRTRPAQVLVNHEWHVLPQESVFRFSFVPVVDGDFLSDTPEALINAGDFHGLQVLVGVVKDEGSYFLVYGAPGFSKDNESLISRAEFLAGVRVGVPQVSDLAAEAVVLHYTDWLHPEDPARLREALSDVVGDHNVVCPVAQLAGRLAAQGARVYAYVFEHRASTLSWPLWMGVPHGYEIEFIFGIPLDPSRNYTAEEKIFAQRLMRYWANFARTGDPNEPRDPKAPQWPPYTAGAQQYVSLDLRPLEVRRGLRAQACAFWNRFLPKLLSATASEAPSTCPGFTHGEAAPRPGLPLPLLLLHQLLLLFLSHLRRL

SEQ ID NO: 217 - protein, 603 aa, Homo sapiens
  human acetylcholinesterase isoform R precursor
  SIGNAL (1)...(31): signal sequence
MRPPQCLLHTPSLASPLLLLLLWLLGGGVGAEGREDAELLVTVRGGRLRGIRLKTPGGPVSAFLGIPFAEPPMGPRRFLPPEPKQPWSGVVDATTFQSVCYQYVDTLYPGFEGTEMWNPNRELSEDCLYLNVWTPYPRPTSPTPVLVWIYGGGFYSGASSLDVYDGRFLVQAERTVLVSMNYRVGAFGFLALPGSREAPGNVGLLDQRLALQWVQENVAAFGGDPTSVTLFGESAGAASVGMHLLSPPSRGLFHRAVLQSGAPNGPWATVGMGEARRRATQLAHLVGCPPGGTGGNDTELVACLRTRPAQVLVNHEWHVLPQESVFRFSFVPVVDGDFLSDTPEALINAGDFHGLQVLVGVVKDEGSYFLVYGAPGFSKDNESLISRAEFLAGVRVGVPQVSDLAAEAVVLHYTDWLHPEDPARLREALSDVVGDHNVVCPVAQLAGRLAAQGARVYAYVFEHRASTLSWPLWMGVPHGYEIEFIFGIPLDPSRNYTAEEKIFAQRLMRYWANFARTGDPNEPRDPKAPQWPPYTAGAQQYVSLDLRPLEVRRGLRAQACAFWNRFLPKLLSATGMQGPAGSAGRRGVGARQCNPSLLPLASE

SEQ ID NO: 218 - protein, 526 aa, Homo sapiens
  human acetylcholinesterase isoform 4 precursor
  SIGNAL (1)...(31): signal sequence
MRPPQCLLHTPSLASPLLLLLLWLLGGGVGAEGREDAELLVTVRGGRLRGIRLKTPGGPVSAFLGIPFAEPPMGPRRFLPPEPKQPWSGVVDATTFQSVCYQYVDTLYPGFEGTEMWNPNRELSEDCLYLNVWTPYPRPTSPTPVLVWIYGGGFYSGASSLDVYDGRFLVQAERTVLVSMNYRVGAFGFLALPGSREAPGNVGLLDQRLALQWVQENVAAFGGDPTSVTLFGESAGAASVGMHLLSPPSRGLFHRAVLQSGAPNGPWATVGMGEARRRATQLAHLVGCPPGGTGGNDTELVACLRTRPAQVLVNHEWHVLPQESVFRFSFVPVVDGDFLSDTPEALINAGDFHGLQLAGRLAAQGARVYAYVFEHRASTLSWPLWMGVPHGYEIEFIFGIPLDPSRNYTAEEKIFAQRLMRYWANFARTGDPNEPRDPKAPQWPPYTAGAQQYVSLDLRPLEVRRGLRAQACAFWNRFLPKLLSATDTLDEAERQWKAEFHRWSSYMVHWKNQFDHYSKQDRCSDL

SEQ ID NO: 219 - protein, 614 aa, Rattus norvegicus
  rat acetylcholinesterase isoform T precursor P37136 P37136
  SIGNAL (1)...(31): signal sequence
MRPPWYPLHTPSLASPLLFLLLSLLGGGARAEGREDPQLLVRVRGGQLRGIRLKAPGGPVSAFLGIPFAEPPVGSRRFMPPEPKRPWSGILDATTFQNVCYQYVDTLYPGFEGTEMWNPNRELSEDCLYLNVWTPYPRPTSPTPVLIWIYGGGFYSGASSLDVYDGRFLAQVEGTVLVSMNYRVGTFGFLALPGSREAPGNVGLLDQRLALQWVQENIAAFGGDPMSVTLFGESAGAASVGMHILSLPSRSLFHRAVLQSGTPNGPWATVSAGEARRRATLLARLVGCPPGGAGGNDTELISCLRTRPAQDLVDHEWHVLPQESIFRFSFVPVVDGDFLSDTPDALINTGDFQDLQVLVGVVKDEGSYFLVYGVPGFSKDNESLISRAQFLAGVRIGVPQASDLAAEAVVLHYTDWLHPEDPAHLRDAMSAVVGDHNVVCPVAQLAGRLAAQGARVYAYIFEHRASTLTWPLWMGVPHGYEIEFIFGLPLDPSLNYTVEERIFAQRLMQYWTNFARTGDPNDPRDSKSPRWPPYTTAAQQYVSLNLKPLEVRRGLRAQTCAFWNRFLPKLLSATDTLDEAERQWKAEFHRWSSYMVHWKNQFDHYSKQERCSDL

SEQ ID NO: 220 - protein, 583 aa, Rattus norvegicus
  rat acetylcholinesterase isoform T mature  P37136
EGREDPQLLVRVRGGQLRGIRLKAPGGPVSAFLGIPFAEPPVGSRRFMPPEPKRPWSGILDATTFQNVCYQYVDTLYPGFEGTEMWNPNRELSEDCLYLNVWTPYPRPTSPTPVLIWIYGGGFYSGASSLDVYDGRFLAQVEGTVLVSMNYRVGTFGFLALPGSREAPGNVGLLDQRLALQWVQENIAAFGGDPMSVTLFGESAGAASVGMHILSLPSRSLFHRAVLQSGTPNGPWATVSAGEARRRATLLARLVGCPPGGAGGNDTELISCLRTRPAQDLVDHEWHVLPQESIFRFSFVPVVDGDFLSDTPDALINTGDFQDLQVLVGVVKDEGSYFLVYGVPGFSKDNESLISRAQFLAGVRIGVPQASDLAAEAVVLHYTDWLHPEDPAHLRDAMSAVVGDHNVVCPVAQLAGRLAAQGARVYAYIFEHRASTLTWPLWMGVPHGYEIEFIFGLPLDPSLNYTVEERIFAQRLMQYWTNFARTGDPNDPRDSKSPRWPPYTTAAQQYVSLNLKPLEVRRGLRAQTCAFWNRFLPKLLSATDTLDEAERQWKAEFHRWSSYMVHWKNQFDHYSKQERCSDL

SEQ ID NO: 221 - protein, 614 aa, Mus musculus
  mouse acetylcholinesterase precursor P21836
  SIGNAL (1)...(31): signal sequence
MRPPWYPLHTPSLAFPLLFLLLSLLGGGARAEGREDPQLLVRVRGGQLRGIRLKAPGGPVSAFLGIPFAEPPVGSRRFMPPEPKRPWSGVLDATTFQNVCYQYVDTLYPGFEGTEMWNPNRELSEDCLYLNVWTPYPRPASPTPVLIWIYGGGFYSGAASLDVYDGRFLAQVEGAVLVSMNYRVGTFGFLALPGSREAPGNVGLLDQRLALQWVQENIAAFGGDPMSVTLFGESAGAASVGMHILSLPSRSLFHRAVLQSGTPNGPWATVSAGEARRRATLLARLVGCPPGGAGGNDTELIACLRTRPAQDLVDHEWHVLPQESIFRFSFVPVVDGDFLSDTPEALINTGDFQDLQVLVGVVKDEGSYFLVYGVPGFSKDNESLISRAQFLAGVRIGVPQASDLAAEAVVLHYTDWLHPEDPTHLRDAMSAVVGDHNVVCPVAQLAGRLAAQGARVYAYIFEHRASTLTWPLWMGVPHGYEIEFIFGLPLDPSLNYTTEERIFAQRLMKYWTNFARTGDPNDPRDSKSPQWPPYTTAAQQYVSLNLKPLEVRRGLRAQTCAFWNRFLPKLLSATDTLDEAERQWKAEFHRWSSYMVHWKNQFDHYSKQERCSDL

SEQ ID NO: 222 - protein, 583 aa, Mus musculus
  mouse acetylcholinesterase mature P21836
EGREDPQLLVRVRGGQLRGIRLKAPGGPVSAFLGIPFAEPPVGSRRFMPPEPKRPWSGVLDATTFQNVCYQYVDTLYPGFEGTEMWNPNRELSEDCLYLNVWTPYPRPASPTPVLIWIYGGGFYSGAASLDVYDGRFLAQVEGAVLVSMNYRVGTFGFLALPGSREAPGNVGLLDQRLALQWVQENIAAFGGDPMSVTLFGESAGAASVGMHILSLPSRSLFHRAVLQSGTPNGPWATVSAGEARRRATLLARLVGCPPGGAGGNDTELIACLRTRPAQDLVDHEWHVLPQESIFRFSFVPVVDGDFLSDTPEALINTGDFQDLQVLVGVVKDEGSYFLVYGVPGFSKDNESLISRAQFLAGVRIGVPQASDLAAEAVVLHYTDWLHPEDPTHLRDAMSAVVGDHNVVCPVAQLAGRLAAQGARVYAYIFEHRASTLTWPLWMGVPHGYEIEFIFGLPLDPSLNYTTEERIFAQRLMKYWTNFARTGDPNDPRDSKSPQWPPYTTAAQQYVSLNLKPLEVRRGLRAQTCAFWNRFLPKLLSATDTLDEAERQWKAEFHRWSSYMVHWKNQFDHYSKQERCSDL

SEQ ID NO: 223 - protein, 584 aa, Oryctolagus cuniculus
  rabbit acetylcholinesterase precursor Q29499
AEGREDPELLVTVRGGRLRGLRLKAPGGPVSAFLGIPFEEPPVGPRRFLPPEPKRPWAGVLDATAFQSVCYQYVDTLYPGFEGTEMWNPNRELSEDCLYLNVWTPYPRPTSPTPVLVWIYGGGFYSGASSLDVYYGRFLVQAEGTVLVAMNYRVGAFGFTCLPGSREAPGNVGLLDQRLALQWVQENVAAFGGDPASVTLFGESAGAASVGLHLLSPPSRGLFHRAVLQSGAPNGPWATVGVGEARRRATLLARLVVCPPGGAGGNDTELVACLRTRPAQDLVDHEWRVLPQESIFRFSFVPVVDGDFLSDTPEALINAGDFQGLQVLVGVVKDEGTYFLVYGAPGFSKDNESFISRAQFLAGVRVGVPQASDLAAEAVVLHYTDWLHPEDPARLRDALSDVVGDHNVVCPVAQLAGRLAAQGARVYAYVFEHRASTLSWPLWMGVPHGYEIEFIFGLPLEPSLNYTEEERIFAQRLMRYWANFARTGDPNEPRDAKAPQWPPYTAGAQQYVSLNLRPLEVRRGLRAQACAFWNRFLPKLLSATDTLDEAERQWKAEFHRWSSYMVHWKNQFDHYSKQDRCSDL

SEQ ID NO: 224 - protein, 583 aa, Oryctolagus cuniculus
  rabbit acetylcholinesterase mature Q29499
EGREDPELLVTVRGGRLRGLRLKAPGGPVSAFLGIPFEEPPVGPRRFLPPEPKRPWAGVLDATAFQSVCYQYVDTLYPGFEGTEMWNPNRELSEDCLYLNVWTPYPRPTSPTPVLVWIYGGGFYSGASSLDVYYGRFLVQAEGTVLVAMNYRVGAFGFTCLPGSREAPGNVGLLDQRLALQWVQENVAAFGGDPASVTLFGESAGAASVGLHLLSPPSRGLFHRAVLQSGAPNGPWATVGVGEARRRATLLARLVVCPPGGAGGNDTELVACLRTRPAQDLVDHEWRVLPQESIFRFSFVPVVDGDFLSDTPEALINAGDFQGLQVLVGVVKDEGTYFLVYGAPGFSKDNESFISRAQFLAGVRVGVPQASDLAAEAVVLHYTDWLHPEDPARLRDALSDVVGDHNVVCPVAQLAGRLAAQGARVYAYVFEHRASTLSWPLWMGVPHGYEIEFIFGLPLEPSLNYTEEERIFAQRLMRYWANFARTGDPNEPRDAKAPQWPPYTAGAQQYVSLNLRPLEVRRGLRAQACAFWNRFLPKLLSATDTLDEAERQWKAEFHRWSSYMVHWKNQFDHYSKQDRCSDL

SEQ ID NO: 225 - protein, 603 aa, Gallus gallus
  chicken acetylcholinesterase precursor Q90ZK8
  SIGNAL (1)...(29): signal sequence
MVWANGMSICARFLMWLLLLFMFIRKVVPEDNVITTEKGRVRGTNLQVLGGTVTAFLGIPYGKPPIGRLRFQKPEPFEKWSGIWKATKHANSCYQLIDTTYPGFPGTEMWNPKTNLSEDCLYLNVWIPSPKPKNATVMVWIYGGSFETGSTSLPVYDGKFLARVERVIVVSMNYRTGALGFLALPGNKEVPGNAGLFDQRLALQWVQENIASFGGNPKSVTIFGESAGSASVSYHILSPKSHPLFTRAIMQSGSANAPWAAITASEARRRTVALAKQLKCPTSDETELILCLQDKDPKDILENEVYVVKYFSLLHIYFCPTVDGDFLADMPEALIKNGIFKQTQVLVGVNKDEGTSFLVYGVPGFSKDSDSLINKTQFEVALTLSFPQVSKLAIESIIFQYTDWENEQKPEHYRDAMDDVIGDYHIICPAVEFAKTIAEVGNNVFFYFFEHRSSKLPWPEWMGVMHGYEIEFVFGLPLERRVNYTKAEEILSRSMLRYWASFAKTGNPNGTLINGTRWPVFTSTEQKYLTLNTDASEILTKLRAQQCRFWNMFFPKVLEMTGNIDEAEREWKAGFHRWNNYMMDWKNQFNDYTSKKERCAGSN

SEQ ID NO: 226 - protein, 574 aa, Gallus gallus
  chicken acetylcholinesterase mature Q90ZK8
EDNVITTEKGRVRGTNLQVLGGTVTAFLGIPYGKPPIGRLRFQKPEPFEKWSGIWKATKHANSCYQLIDTTYPGFPGTEMWNPKTNLSEDCLYLNVWIPSPKPKNATVMVWIYGGSFETGSTSLPVYDGKFLARVERVIVVSMNYRTGALGFLALPGNKEVPGNAGLFDQRLALQWVQENIASFGGNPKSVTIFGESAGSASVSYHILSPKSHPLFTRAIMQSGSANAPWAAITASEARRRTVALAKQLKCPTSDETELILCLQDKDPKDILENEVYVVKYFSLLHIYFCPTVDGDFLADMPEALIKNGIFKQTQVLVGVNKDEGTSFLVYGVPGFSKDSDSLINKTQFEVALTLSFPQVSKLAIESIIFQYTDWENEQKPEHYRDAMDDVIGDYHIICPAVEFAKTIAEVGNNVFFYFFEHRSSKLPWPEWMGVMHGYEIEFVFGLPLERRVNYTKAEEILSRSMLRYWASFAKTGNPNGTLINGTRWPVFTSTEQKYLTLNTDASEILTKLRAQQCRFWNMFFPKVLEMTGNIDEAEREWKAGFHRWNNYMMDWKNQFNDYTSKKERCAGSN

SEQ ID NO: 227 - protein, 611 aa, Felis catus
  cat acetylcholinesterase precursor O62763
  SIGNAL (1)...(31): signal sequence
MRPPWCPLYTPSLAAPILLLLLFLLGGGAEAEDPELLVTVRGGQLRGVRLMAPGGPVSAFLGIPFAEPPVGPRRFLPPEPKRPWPGVLDATAFQSVCYQYVDTLYPGFEGTEMWNPNRELSEDCLYLNVWTPYPRPASPTPVLVWIYGGGFYSGASSLDVYDGRFLAQAEGTVLVSMNYRVGAFGFLALPGSREAPGNVGLLDQRLALQWVQDNVATFGGDPMSVTLFGESAGAASVGMHLLSPPSRGLFHRAVLQSGAPNGPWATVGVGEARRRATLLARLVGCPPGGAGGNDTELVACLRTRPAQDLVDHEWHVLPQESVFRFSFVPVVDGDFLSDTPEALINAGDFHGLQVLVGVVKDEGSYFLVYGAPGFSKDNESLISRAQFLAGVRVGVPQASDLAAEAVVLHYTDWLNPEDPARLREAMSDVVGDHNVVCPVAQLAGRLAAQGARVYAYIFEHRASTLSWPLWMGVPHGYEIEFIFGLPLEPSLNYTAEERIFAQRLMRYWANFARTGDPNDPRDPKVPQWPPYTAGAQQYVSLDLRPLEVRRGLRAQACAFWNRFLPKLLSATDTLDEAERQWKAEFHRWSSYMVHWKNQFDHYSKQDRCSDL

SEQ ID NO: 228 - protein, 581 aa, Felis catus
  cat acetylcholinesterase mature O62763
AEDPELLVTVRGGQLRGVRLMAPGGPVSAFLGIPFAEPPVGPRRFLPPEPKRPWPGVLDATAFQSVCYQYVDTLYPGFEGTEMWNPNRELSEDCLYLNVWTPYPRPASPTPVLVWIYGGGFYSGASSLDVYDGRFLAQAEGTVLVSMNYRVGAFGFLALPGSREAPGNVGLLDQRLALQWVQDNVATFGGDPMSVTLFGESAGAASVGMHLLSPPSRGLFHRAVLQSGAPNGPWATVGVGEARRRATLLARLVGCPPGGAGGNDTELVACLRTRPAQDLVDHEWHVLPQESVFRFSFVPVVDGDFLSDTPEALINAGDFHGLQVLVGVVKDEGSYFLVYGAPGFSKDNESLISRAQFLAGVRVGVPQASDLAAEAVVLHYTDWLNPEDPARLREAMSDVVGDHNVVCPVAQLAGRLAAQGARVYAYIFEHRASTLSWPLWMGVPHGYEIEFIFGLPLEPSLNYTAEERIFAQRLMRYWANFARTGDPNDPRDPKVPQWPPYTAGAQQYVSLDLRPLEVRRGLRAQACAFWNRFLPKLLSATDTLDEAERQWKAEFHRWSSYMVHWKNQFDHYSKQDRCSDL

SEQ ID NO: 229 - protein, 613 aa, Bos taurus
  cow acetylcholinesterase precursor P23795
  SIGNAL (1)...(30): signal sequence
MRPPWCPLHTPSLTPPLLLLLFLIGGGAEAEGPEDPELLVMVRGGRLRGLRLMAPRGPVSAFLGIPFAEPPVGPRRFLPPEPKRPWPGVLNATAFQSVCYQYVDTLYPGFEGTEMWNPNRELSEDCLYLNVWTPYPRPSSPTPVLVWIYGGGFYSGASSLDVYDGRFLTQAEGTVLVSMNYRVGAFGFLALPGSREAPGNVGLLDQRLALQWVQENVAAFGGDPTSVTLFGESAGAASVGMHLLSPPSRGLFHRAVLQSGAPNGPWATVGVGEARRRATLLARLVGCPPGGAGGNDTELVACLRARPAQDLVDHEWRVLPQESVFRFSFVPVVDGDFLSDTPEALINAGDFHGLQVLVGVVKDEGSYFLVYGAPGFSKDNESLISRAQFLAGVRVGVPQASDLAAEAVVLHYTDWLHPEDPARLREALSDVVGDHNVVCPVAQLAGRLAAQGARVYAYIFEHRASTLSWPLWMGVPHGYEIEFIFGLPLEPSLNYTIEERTFAQRLMRYWANFARTGDPNDPRDPKAPQWPPYTAGAQQYVSLNLRPLEVRRGLRAQACAFWNRFLPKLLSATDTLDEAERQWKAEFHRWSSYMVHWKNQFDHYSKQDRCSDL

SEQ ID NO: 230 - protein, 583 aa, Bos taurus
  cow acetylcholinesterase mature P23795
EGPEDPELLVMVRGGRLRGLRLMAPRGPVSAFLGIPFAEPPVGPRRFLPPEPKRPWPGVLNATAFQSVCYQYVDTLYPGFEGTEMWNPNRELSEDCLYLNVWTPYPRPSSPTPVLVWIYGGGFYSGASSLDVYDGRFLTQAEGTVLVSMNYRVGAFGFLALPGSREAPGNVGLLDQRLALQWVQENVAAFGGDPTSVTLFGESAGAASVGMHLLSPPSRGLFHRAVLQSGAPNGPWATVGVGEARRRATLLARLVGCPPGGAGGNDTELVACLRARPAQDLVDHEWRVLPQESVFRFSFVPVVDGDFLSDTPEALINAGDFHGLQVLVGVVKDEGSYFLVYGAPGFSKDNESLISRAQFLAGVRVGVPQASDLAAEAVVLHYTDWLHPEDPARLREALSDVVGDHNVVCPVAQLAGRLAAQGARVYAYIFEHRASTLSWPLWMGVPHGYEIEFIFGLPLEPSLNYTIEERTFAQRLMRYWANFARTGDPNDPRDPKAPQWPPYTAGAQQYVSLNLRPLEVRRGLRAQACAFWNRFLPKLLSATDTLDEAERQWKAEFHRWSSYMVHWKNQFDHYSKQDRCSDL

SEQ ID NO: 231 - protein, 596 aa, Torpedo californica
  Pacific electric ray acetylcholinesterase precursor P04058
  SIGNAL (1)...(21): signal sequence
MNLLVTSSLGVLLHLVVLCQADDHSELLVNTKSGKVMGTRVPVLSSHISAFLGIPFAEPPVGNMRFRRPEPKKPWSGVWNASTYPNNCQQYVDEQFPGFSGSEMWNPNREMSEDCLYLNIWVPSPRPKSTTVMVWIYGGGFYSGSSTLDVYNGKYLAYTEEVVLVSLSYRVGAFGFLALHGSQEAPGNVGLLDQRMALQWVHDNIQFFGGDPKTVTIFGESAGGASVGMHILSPGSRDLFRRAILQSGSPNCPWASVSVAEGRRRAVELGRNLNCNLNSDEELIHCLREKKPQELIDVEWNVLPFDSIFRFSFVPVIDGEFFPTSLESMLNSGNFKKTQILLGVNKDEGSFFLLYGAPGFSKDSESKISREDFMSGVKLSVPHANDLGLDAVTLQYTDWMDDNNGIKNRDGLDDIVGDHNVICPLMHFVNKYTKFGNGTYLYFFNHRASNLVWPEWMGVIHGYEIEFVFGLPLVKELNYTAEEEALSRRIMHYWATFAKTGNPNEPHSQESKWPLFTTKEQKFIDLNTEPMKVHQRLRVQMCVFWNQFLPKLLNATETIDEAERQWKTEFHRWSSYMMHWKNQFDHYSRHESCAEL

SEQ ID NO: 232 - protein, 576 aa, Torpedo californica
  Pacific electric ray acetylcholinesterase mature P04058
ADDHSELLVNTKSGKVMGTRVPVLSSHISAFLGIPFAEPPVGNMRFRRPEPKKPWSGVWNASTYPNNCQQYVDEQFPGFSGSEMWNPNREMSEDCLYLNIWVPSPRPKSTTVMVWIYGGGFYSGSSTLDVYNGKYLAYTEEVVLVSLSYRVGAFGFLALHGSQEAPGNVGLLDQRMALQWVHDNIQFFGGDPKTVTIFGESAGGASVGMHILSPGSRDLFRRAILQSGSPNCPWASVSVAEGRRRAVELGRNLNCNLNSDEELIHCLREKKPQELIDVEWNVLPFDSIFRFSFVPVIDGEFFPTSLESMLNSGNFKKTQILLGVNKDEGSFFLLYGAPGFSKDSESKISREDFMSGVKLSVPHANDLGLDAVTLQYTDWMDDNNGIKNRDGLDDIVGDHNVICPLMHFVNKYTKFGNGTYLYFFNHRASNLVWPEWMGVIHGYEIEFVFGLPLVKELNYTAEEEALSRRIMHYWATFAKTGNPNEPHSQESKWPLFTTKEQKFIDLNTEPMKVHQRLRVQMCVFWNQFLPKLLNATETIDEAERQWKTEFHRWSSYMMHWKNQFDHYSRHESCAEL

SEQ ID NO: 233 - protein, 649 aa, Drosophila melanogaster
  fruit fly acetylcholinesterase precursor P07140
  SIGNAL (1)...(38): signal sequence
MAISCRQSRVLPMSLPLPLTIPLPLVLVLSLHLSGVCGVIDRLVVQTSSGPVRGRSVTVQGREVHVYTGIPYAKPPVEDLRFRKPVPAEPWHGVLDATGLSATCVQERYEYFPGFSGEEIWNPNTNVSEDCLYINVWAPAKARLRHGRGANGGEHPNGKQADTDHLIHNGNPQNTTNGLPILIWIYGGGFMTGSATLDIYNADIMAAVGNVIVASFQYRVGAFGFLHLAPEMPSEFAEEAPGNVGLWDQALAIRWLKDNAHAFGGNPEWMTLFGESAGSSSVNAQLMSPVTRGLVKRGMMQSGTMNAPWSHMTSEKAVEIGKALINDCNCNASMLKTNPAHVMSCMRSVDAKTISVQQWNSYSGILSFPSAPTIDGAFLPADPMTLMKTADLKDYDILMGNVRDEGTYFLLYDFIDYFDKDDATALPRDKYLEIMNNIFGKATQAEREAIIFQYTSWEGNPGYQNQQQIGRAVGDHFFTCPTNEYAQALAERGASVHYYYFTHRTSTSLWGEWMGVLHGDEIEYFFGQPLNNSLQYRPVERELGKRMLSAVIEFAKTGNPAQDGEEWPNFSKEDPVYYIFSTDDKIEKLARGPLAARCSFWNDYLPKVRSWAGTCDGDSGSASISPRLQLLGIAALIYICAALRTKRVF

SEQ ID NO: 234 - protein, 611 aa, Drosophila melanogaster
  fruit fly acetylcholinesterase mature P07140
VIDRLVVQTSSGPVRGRSVTVQGREVHVYTGIPYAKPPVEDLRFRKPVPAEPWHGVLDATGLSATCVQERYEYFPGFSGEEIWNPNTNVSEDCLYINVWAPAKARLRHGRGANGGEHPNGKQADTDHLIHNGNPQNTTNGLPILIWIYGGGFMTGSATLDIYNADIMAAVGNVIVASFQYRVGAFGFLHLAPEMPSEFAEEAPGNVGLWDQALAIRWLKDNAHAFGGNPEWMTLFGESAGSSSVNAQLMSPVTRGLVKRGMMQSGTMNAPWSHMTSEKAVEIGKALINDCNCNASMLKTNPAHVMSCMRSVDAKTISVQQWNSYSGILSFPSAPTIDGAFLPADPMTLMKTADLKDYDILMGNVRDEGTYFLLYDFIDYFDKDDATALPRDKYLEIMNNIFGKATQAEREAIIFQYTSWEGNPGYQNQQQIGRAVGDHFFTCPTNEYAQALAERGASVHYYYFTHRTSTSLWGEWMGVLHGDEIEYFFGQPLNNSLQYRPVERELGKRMLSAVIEFAKTGNPAQDGEEWPNFSKEDPVYYIFSTDDKIEKLARGPLAARCSFWNDYLPKVRSWAGTCDGDSGSASISPRLQLLGIAALIYICAALRTKRVF

SEQ ID NO: 235 - protein, 602 aa, Homo sapiens; identical to SEQ ID NO: 212
  human butyrylcholinesterase precursor P06276
  SIGNAL (1)...(28): signal sequence

SEQ ID NO: 236 - protein, 574 aa, Homo sapiens
  human butyrylcholinesterase mature P06276
EDDIIIATKNGKVRGMNLTVFGGTVTAFLGIPYAQPPLGRLRFKKPQSLTKWSDIWNATKYANSCCQNIDQSFPGFHGSEMWNPNTDLSEDCLYLNVWIPAPKPKNATVLIWIYGGGFQTGTSSLHVYDGKFLARVERVIVVSMNYRVGALGFLALPGNPEAPGNMGLFDQQLALQWVQKNIAAFGGNPKSVTLFGESAGAASVSLHLLSPGSHSLFTRAILQSGSFNAPWAVTSLYEARNRTLNLAKLTGCSRENETEIIKCLRNKDPQEILLNEAFVVPYGTPLSVNFGPTVDGDFLTDMPDILLELGQFKKTQILVGVNKDEGTAFLVYGAPGFSKDNNSIITRKEFQEGLKIFFPGVSEFGKESILFHYTDWVDDQRPENYREALGDVVGDYNFICPALEFTKKFSEWGNNAFFYYFEHRSSKLPWPEWMGVMHGYEIEFVFGLPLERRDNYTKAEEILSRSIVKRWANFAKYGNPNETQNNSTSWPVFKSTEQKYLTLNTESTRIMTKLRAQQCRFWTSFFPKVLEMTGNIDEAEWEWKAGFHRWNNYMMDWKNQFNDYTSKKESCVGL

SEQ ID NO: 237 - protein, 602 aa, Homo sapiens
  human butyrylcholinesterase precursor H variant V170M
  SIGNAL (1)...(28): signal sequence
MHSKVTIICIRFLFWFLLLCMLIGKSHTEDDIIIATKNGKVRGMNLTVFGGTVTAFLGIPYAQPPLGRLRFKKPQSLTKWSDIWNATKYANSCCQNIDQSFPGFHGSEMWNPNTDLSEDCLYLNVWIPAPKPKNATVLIWIYGGGFQTGTSSLHVYDGKFLARVERVIVMSMNYRVGALGFLALPGNPEAPGNMGLFDQQLALQWVQKNIAAFGGNPKSVTLFGESAGAASVSLHLLSPGSHSLFTRAILQSGSFNAPWAVTSLYEARNRTLNLAKLTGCSRENETEIIKCLRNKDPQEILLNEAFVVPYGTPLSVNFGPTVDGDFLTDMPDILLELGQFKKTQILVGVNKDEGTAFLVYGAPGFSKDNNSIITRKEFQEGLKIFFPGVSEFGKESILFHYTDWVDDQRPENYREALGDVVGDYNFICPALEFTKKFSEWGNNAFFYYFEHRSSKLPWPEWMGVMHGYEIEFVFGLPLERRDNYTKAEEILSRSIVKRWANFAKYGNPNETQNNSTSWPVFKSTEQKYLTLNTESTRIMTKLRAQQCRFWTSFFPKVLEMTGNIDEAEWEWKAGFHRWNNYMMDWKNQFNDYTSKKESCVGL

SEQ ID NO: 238 - protein, 602 aa, Homo sapiens
  human J variant butyrylcholinesterase
  SIGNAL (1)...(28): signal sequence
MHSKVTIICIRFLFWFLLLCMLIGKSHTEDDIIIATKNGKVRGMNLTVFGGTVTAFLGIPYAQPPLGRLRFKKPQSLTKWSDIWNATKYANSCCQNIDQSFPGFHGSEMWNPNTDLSEDCLYLNVWIPAPKPKNATVLIWIYGGGFQTGTSSLHVYDGKFLARVERVIVVSMNYRVGALGFLALPGNPEAPGNMGLFDQQLALQWVQKNIAAFGGNPKSVTLFGESAGAASVSLHLLSPGSHSLFTRAILQSGSFNAPWAVTSLYEARNRTLNLAKLTGCSRENETEIIKCLRNKDPQEILLNEAFVVPYGTPLSVNFGPTVDGDFLTDMPDILLELGQFKKTQILVGVNKDEGTAFLVYGAPGFSKDNNSIITRKEFQEGLKIFFPGVSEFGKESILFHYTDWVDDQRPENYREALGDVVGDYNFICPALEFTKKFSEWGNNAFFYYFEHRSSKLPWPEWMGVMHGYEIEFVFGLPLERRDNYTKAEEILSRSIVKRWANFAKYGNPNETQNNSTSWPVFKSTVQKYLTLNTESTRIMTKLRAQQCRFWTSFFPKVLEMTGNIDEAEWEWKAGFHRWNNYMMDWKNQFNDYTSKKESCVGL

SEQ ID NO: 239 - protein, 602 aa, Homo sapiens [sequence omitted]

SEQ ID NO: 240 - protein, 597 aa, Rattus norvegicus
  rat butyrylcholinesterase precursor NP_075231
  SIGNAL (1)...(23): signal sequence
MVTEIHFLLWILLLCMLFGKSHTEEDVIITTKTGRVRGLSMPILGGTVTAFLGIPYAQPPLGSLRFKKPQPLNKWPDVYNATKYANSCYQNIDQAFPGFQGSEMWNPNTNLSEDCLYLNVWIPVPKPKNATVMVWVYGGGFQTGTSSLPVYDGKFLTRVERVIVVSMNYRVGALGFLAFPGNSEAPGNMGLFDQQLALQWIQRNIAAFGGNPKSVTLFGESAGAASVSLHLLCPQSYPLFTRAILESGSSNAPWAVKHPEEARNRTLTLAKFIGCSKENEKEIITCLRSKDPQEILLNEKLVLPSDSIRSINFGPTVDGDFLTDMPHTLLQLGKVKTAQILVGVNKDEGTAFLVYGAPGFSKDNDSLITRREFQEGLNMYFPGVSSLGKEAILFYYVDWLGDQTPEVYREAFDDIIGDYNIICPALEFTKKFAELEINAFFYYFEHRSSKLPWPEWMGVMHGYEIEFVFGLPLERRVNYTRAEEIFSRSIMKTWANFAKYGHPNGTQGNSTVWPVFTSTEQKYLTLNTEKSKINSKLRAPQCQFWRLFFPKVLEITGDIDEREQEWKAGFHRWSNYMMDWKNQFNDYTSKKETCTDL

SEQ ID NO: 241 - protein, 603 aa, Mus musculus
  mouse butyrylcholinesterase precursor Q03311
  SIGNAL (1)...(29): signal sequence
MQTQHTKVTQTHFLLWILLLCMPFGKSHTEEDFIITTKTGRVRGLSMPVLGGTVTAFLGIPYAQPPLGSLRFKKPQPLNKWPDIHNATQYANSCYQNIDQAFPGFQGSEMWNPNTNLSEDCLYLNVWIPVPKPKNATVMVWIYGGGFQTGTSSLPVYDGKFLARVERVIVVSMNYRVGALGFLAFPGNPDAPGNMGLFDQQLALQWVQRNIAAFGGNPKSITIFGESAGAASVSLHLLCPQSYPLFTRAILESGSSNAPWAVKHPEEARNRTLTLAKFTGCSKENEMEMIKCLRSKDPQEILRNERFVLPSDSILSINFGPTVDGDFLTDMPHTLLQLGKVKKAQILVGVNKDEGTAFLVYGAPGFSKDNDSLITRKEFQEGLNMYFPGVSRLGKEAVLFYYVDWLGEQSPEVYRDALDDVIGDYNIICPALEFTKKFAELENNAFFYFFEHRSSKLPWPEWMGVMHGYEIEFVFGLPLGRRVNYTRAEEIFSRSIMKTWANFAKYGHPNGTQGNSTMWPVFTSTEQKYLTLNTEKSKIYSKLRAPQCQFWRLFFPKVLEMTGDIDETEQEWKAGFHRWSNYMMDWQNQFNDYTSKKESCTAL

SEQ ID NO: 242 - protein, 574 aa, Mus musculus
  mouse butyrylcholinesterase mature Q03311
EEDFIITTKTGRVRGLSMPVLGGTVTAFLGIPYAQPPLGSLRFKKPQPLNKWPDIHNATQYANSCYQNIDQAFPGFQGSEMWNPNTNLSEDCLYLNVWIPVPKPKNATVMVWIYGGGFQTGTSSLPVYDGKFLARVERVIVVSMNYRVGALGFLAFPGNPDAPGNMGLFDQQLALQWVQRNIAAFGGNPKSITIFGESAGAASVSLHLLCPQSYPLFTRAILESGSSNAPWAVKHPEEARNRTLTLAKFTGCSKENEMEMIKCLRSKDPQEILRNERFVLPSDSILSINFGPTVDGDFLTDMPHTLLQLGKVKKAQILVGVNKDEGTAFLVYGAPGFSKDNDSLITRKEFQEGLNMYFPGVSRLGKEAVLFYYVDWLGEQSPEVYRDALDDVIGDYNIICPALEFTKKFAELENNAFFYFFEHRSSKLPWPEWMGVMHGYEIEFVFGLPLGRRVNYTRAEEIFSRSIMKTWANFAKYGHPNGTQGNSTMWPVFTSTEQKYLTLNTEKSKIYSKLRAPQCQFWRLFFPKVLEMTGDIDETEQEWKAGFHRWSNYMMDWQNQFNDYTSKKESCTAL

SEQ ID NO: 243 - protein, 602 aa, Felis catus
  cat butyrylcholinesterase precursor
  SIGNAL (1)...(28): signal sequence
MQSKGTIISIQFLLRFLLLWVLIGKSHTEEDIIITTKNGKVRGMNLPVLDGTVTAFLGIPYAQPPLGRLRFKKPQFLTKWSDIWNATKYANSCYQNADQSFPGFPGSEMWNPNTDLSEDCLYLNVWIPTPKPKNATVMIWIYGGGFQTGTSSLPVYDGKFLARVERVIVVSMNYRVGALGFLALPGNPEVPGNMGLFDQQLALQWVQKNIAAFGGNPKSVTLFGESAGAGSVSLHLLSPRSQPLFTRAILQSGSSNAPWAVMSLDEAKNRTLTLAKFIGCSKENDTEIIKCLRNKDPQEILLNELLVVPSDTLLSVNFGPVVDGDFLTDMPDTLLQLGQFKKTQILVGVNKDEGTAFLVYGAPGFSKDNDSIITRKEFQEGLKIYFPGVSEFGREAILFYYVDLLDDQRAEKYREALDDVLGDYNIICPALEFTTKFSELGNNAFFYYFEHRSSQLPWPEWMGVMHGYEIEFVFGLPLERRVNYTRAEEILSRSIMNYWANFAKYGNPNGTQNNSTRWPAFRSTDQKYLTLNAESPKVYTKLRAQQCRFWTLFFPKVLEMTGNIDEAEREWRAGFYRWNNYMMDWKNQFNDYTSKKESCAGL

SEQ ID NO: 244 - protein, 574 aa, Felis catus
  cat butyrylcholinesterase mature
EEDIIITTKNGKVRGMNLPVLDGTVTAFLGIPYAQPPLGRLRFKKPQFLTKWSDIWNATKYANSCYQNADQSFPGFPGSEMWNPNTDLSEDCLYLNVWIPTPKPKNATVMIWIYGGGFQTGTSSLPVYDGKFLARVERVIVVSMNYRVGALGFLALPGNPEVPGNMGLFDQQLALQWVQKNIAAFGGNPKSVTLFGESAGAGSVSLHLLSPRSQPLFTRAILQSGSSNAPWAVMSLDEAKNRTLTLAKFIGCSKENDTEIIKCLRNKDPQEILLNELLVVPSDTLLSVNFGPVVDGDFLTDMPDTLLQLGQFKKTQILVGVNKDEGTAFLVYGAPGFSKDNDSIITRKEFQEGLKIYFPGVSEFGREAILFYYVDLLDDQRAEKYREALDDVLGDYNIICPALEFTTKFSELGNNAFFYYFEHRSSQLPWPEWMGVMHGYEIEFVFGLPLERRVNYTRAEEILSRSIMNYWANFAKYGNPNGTQNNSTRWPAFRSTDQKYLTLNAESPKVYTKLRAQQCRFWTLFFPKVLEMTGNIDEAEREWRAGFYRWNNYMMDWKNQFNDYTSKKESCAGL

SEQ ID NO: 245 - protein, 574 aa, Equus caballus
  horse butyrylcholinesterase precursor P81908
EEDIIITTKNGKVRGMNLPVLGGTVTAFLGIPYAQPPLGRLRFKKPQSLTKWSNIWNATKYANSCYQNTDQSFPGFLGSEMWNPNTELSEDCLYLNVWIPAPKPKNATVMIWIYGGGFQTGTSSLPVYDGKFLARVERVIVVSMNYRVGALGFLALSENPEAPGNMGLFDQQLALQWVQKNIAAFGGNPRSVTLFGESAGAASVSLHLLSPRSQPLFTRAILQSGSSNAPWAVTSLYEARNRTLTLAKRMGCSRDNETEMIKCLRDKDPQEILLNEVFVVPYDTLLSVNFGPTVDGDFLTDMPDTLLQLGQFKRTQILVGVNKDEGTAFLVYGAPGFSKDNNSIITRKEFQEGLKIFFPRVSEFGRESILFHYMDWLDDQRAENYREALDDVVGDYNIICPALEFTRKFSELGNDAFFYYFEHRSTKLPWPEWMGVMHGYEIEFVFGLPLERRVNYTRAEEILSRSIMKRWANFAKYGNPNGTQNNSTRWPVFKSTEQKYLTLNTESPKVYTKLRAQQCRFWTLFFPKVLELTGNIDEAEREWKAGFHRWNNYMMDWKNQFNDYTSKKESCSDF

SEQ ID NO: 246 - protein, 603 aa, Gallus gallus; identical to SEQ ID NO: 225
  chicken butyrylcholinesterase precursor Q90ZK8
  SIGNAL (1)...(29): signal sequence

SEQ ID NO: 247 - protein, 574 aa, Gallus gallus; identical to SEQ ID NO: 226
  chicken butyrylcholinesterase mature Q90ZK8

SEQ ID NO: 248 - protein, 141 aa, Sus scrofa
  pig butyrylcholinesterase P32752 141 aa fragment
NTDQSFPGFVGSEMWNPNTELSEDCLYLNVWIPAPKPKNATVMIWIYGGGFQTGTSSLHVYDGKFLSRVERVIVVSMNYRVGALGFLALPGNPEAPGNMGLFDQQLALQWVQKNIAAFGGNPKSVTLFGESAGAVSVSLHL

SEQ ID NO: 249 - protein, 581 aa, Oryctolagus cuniculus
  rabbit butyrylcholinesterase precursor P21927
  SIGNAL (1)...(8): signal sequence
MVTRSSHTEDVIITTKNGRIRGINLPVFGGTVTAFLGIPYAQPPLGRLRFKKPQSLTKWSDIWNATKYANSCCQNIDQSFPGFHGSEMWNPNTDLSEDCLYLNVWIPTPKPKNATVMIWIYGGGFQTGTSSLQVYDGKFLTRVERVIVVSMNYRVGALGFLALPGNPEAPGNMGLFDQQLALQWVQKNIAAFGGNPKSVTLFGESAGAASVSLHLLSPRSHPLFTRAILQSGSSNAPWEVMSLHEARNRTLTLAKFVGCSTENETEIIKCLRNKDAQEILLNEVFVVPFDSLLSVNFGPTVDGDFLTDMPDTLLQLGQLKKTQILVGVNKDEGTAFLVYGAPGFSKDNTSIITRKEFQEGLKIFFPGVSEFGKESILFHYTDWVDEQRPENYREALDDVVGDYNFICPALEFTKKFSEWGNNAFFYYFEHRSSKLPWPEWMGVMHGYEIEFVFGLPLERRVNYTKAEEILSRSIMKRWANFAKYGNPNGTQNNSTRWPVFKSTEQKYLTLNTESPRIYTKLRAQQCRFWTLFFPKVLEMTGNIDEAEQEWKAGFHRWNNYMMAWKNHFNDYTSKKERCAGF

SEQ ID NO: 250 - protein, 573 aa, Oryctolagus cuniculus
  rabbit butyrylcholinesterase mature P21927
EDVIITTKNGRIRGINLPVFGGTVTAFLGIPYAQPPLGRLRFKKPQSLTKWSDIWNATKYANSCCQNIDQSFPGFHGSEMWNPNTDLSEDCLYLNVWIPTPKPKNATVMIWIYGGGFQTGTSSLQVYDGKFLTRVERVIVVSMNYRVGALGFLALPGNPEAPGNMGLFDQQLALQWVQKNIAAFGGNPKSVTLFGESAGAASVSLHLLSPRSHPLFTRAILQSGSSNAPWEVMSLHEARNRTLTLAKFVGCSTENETEIIKCLRNKDAQEILLNEVFVVPFDSLLSVNFGPTVDGDFLTDMPDTLLQLGQLKKTQILVGVNKDEGTAFLVYGAPGFSKDNTSIITRKEFQEGLKIFFPGVSEFGKESILFHYTDWVDEQRPENYREALDDVVGDYNFICPALEFTKKFSEWGNNAFFYYFEHRSSKLPWPEWMGVMHGYEIEFVFGLPLERRVNYTKAEEILSRSIMKRWANFAKYGNPNGTQNNSTRWPVFKSTEQKYLTLNTESPRIYTKLRAQQCRFWTLFFPKVLEMTGNIDEAEQEWKAGFHRWNNYMMAWKNHFNDYTSKKERCAGF

SEQ ID NO: 251 - protein, 602 aa, Bos taurus
  cow butyrylcholinesterase precursor P32749
  SIGNAL (1)...(28): signal sequence
MQSRSTVIYIRFVLWFLLLWVLFEKSHTEEDIIITTKNGKVRGMHLPVLGGTVTAFLGIPYAQPPLGRLRFKKPQSLTKWPDIWNATKYANSCYQNTDQSFPGFLGSEMWNPNTDLSEDCLYLNVWIPTPKPKNATVMIWIYGGSFQTGTSSLHVYDGKFLARVERVIVVSMNYRVGALGFLALPGNPEAPGNVGLFDQQLALQWVQKNIAAFGGNPKSVTLFGESAGAASVSLHLLSPESHPLFTRAILQSGSSNAPWAVTSRYEARNRTLTLAKFIGCSRENDTEIIKCLRNKDPQEILRHEVFVVPYGTLLSVNFGPTVDGDFLTDMPDTLLQLGQFKKTQILVGVNKDEGTAFLVYGAPGFSKDNNSIITRKEFQEGLKIFFPGVSEFGKESILFHYMDWLDDQRAEKYREALDDVVGDYNIICPALEFTKKFSDMGNNAFFYYFEHRSSKLPWPEWMGVMHGYEIEFVFGLPLERRVNYTKAEEIFSRSIMKRWANFAKYGNPNGTQNNSTRWPVFKSNEQKYFTLNTESPKVNTKLRAQQCRFWTLFFPKVLEITGNIDEVEREWKAGFHRWNNYMMDWKNQFNDYTSKKESCAGL

SEQ ID NO: 252 - protein, 574 aa, Bos taurus
  cow butyrylcholinesterase mature P32749
EEDIIITTKNGKVRGMHLPVLGGTVTAFLGIPYAQPPLGRLRFKKPQSLTKWPDIWNATKYANSCYQNTDQSFPGFLGSEMWNPNTDLSEDCLYLNVWIPTPKPKNATVMIWIYGGSFQTGTSSLHVYDGKFLARVERVIVVSMNYRVGALGFLALPGNPEAPGNVGLFDQQLALQWVQKNIAAFGGNPKSVTLFGESAGAASVSLHLLSPESHPLFTRAILQSGSSNAPWAVTSRYEARNRTLTLAKFIGCSRENDTEIIKCLRNKDPQEILRHEVFVVPYGTLLSVNFGPTVDGDFLTDMPDTLLQLGQFKKTQILVGVNKDEGTAFLVYGAPGFSKDNNSIITRKEFQEGLKIFFPGVSEFGKESILFHYMDWLDDQRAEKYREALDDVVGDYNIICPALEFTKKFSDMGNNAFFYYFEHRSSKLPWPEWMGVMHGYEIEFVFGLPLERRVNYTKAEEIFSRSIMKRWANFAKYGNPNGTQNNSTRWPVFKSNEQKYFTLNTESPKVNTKLRAQQCRFWTLFFPKVLEITGNIDEVEREWKAGFHRWNNYMMDWKNQFNDYTSKKESCAGL

SEQ ID NO: 253 - protein, 141 aa, Ovis aries
  sheep butyrylcholinesterase P32753
NTDQSFPGFLGSEMWNPNTDLSEDCLYLNVWIPTPKPKNATVMIWIYGGSFQTGTSSLHVYDGKFLARVERVIVVSMNYRVGALGFLALPGNPEAPGNVGLFDQQLALQWVQKNIAAFGGNPKSVTLFGESAGAASVSLHL

SEQ ID NO: 254 - protein, 601 aa, Macaca mulatta
  Rhesus macaque butyrylcholinesterase precursor
  SIGNAL (1)...(28): signal sequence
MHSKVTIICIRLLFWFLLLCMLIGKSHTEDDIVIATKNGKVRGMNLTVLGGTVTAFLGIPYAQPPLGRLRFKKPQSLTKWSDIWNATKYANSCYQNIDQSFPGFHGSEMWNPNTDLSEDCLYLNVWIPAPKPKNATVMIWIYGGGFQTGTSSLHVYDGKFLARVERVIVVSMNYRVGALGFLALPGNPEAPGNMGLFDQQLALQWVQKNIAAFGGNPKSVTLFGESAGAASVSLHLLSPGSHPLFTRAILQSGSSNAPWAVTSLYEARNRTLTLAKLTGCSRDNETEIVKCLRNKDPHEILLNEAFVVPYGTLLSVNFGPTMDGDFLTEMPDILLELGQFKKTQILVGVNKDEGTAFLVYGAPGFSKDNDSIITRNEFQEGLKIFFPGVSEFGKESILFHYTDWVDDQRPENYREALDDVVGDYNIICPALEFTKKFSWGNNAFFYYFEHRSSKLPWPEWMGVMHGYEIEFVFGLPLERRVNYTKAEEILSRSIVKRWANFAKYGNPNGTHNNSTKWPVFKSTEQKYLTLNTESSRILTKLRAQQCRFWTSFFPKVLEMTGNIDEAEWEWKAGFHRWSNYMMDWKNQFNDYTSKKESCVGL

SEQ ID NO: 255 - protein, 602 aa, Panthera tigris tigris
  Bengal tiger butyrylcholinesterase precursor O62761
  SIGNAL (1)...(28): signal sequence
MQSKGTIISIQFLLRFLLLWVLIGKSHTEEDIIITTKNGKVRGMNLPVLDGTVTAFLGIPYAQPPLGRLRFKKPQFLTKWSDIWNATKHANSCYQNADQSFPGFPGSEMWNPNTDLSEDCLYLNVWSPTPKPKNATVMIWIYGGGFQTGTSSLPVYDGKFLARVERVIVVSMNYRVGALGFLALPGNPEIPGNMGLFDQQLALQWVQKNIAAFGGNPKSVTLFGESAGAGSVSLHLLSPRSQPLFTRAILQSGSSNAPWAVMSLDEAKNRTLTLAKFIGCSKENDTEIIKCLRNKDPQEILLNELLVVPSDTLLSVNFGPVVDGDFLTDMPDTLLQLGQFKKTQILVGVNKDEGTAFLVYGAPGFSKDNDSIITRKEFQEGLKIYFPGVSEFGREAILFYYVDLLDDQRAEKYREALDDVLGDYNIICPALEFTTKFSELGNNAFFYYFEHRSSQLPWPEWMGVMHGYEIEFVFGLPLERRVNYTRAEEILSRSIMNYWANFAKYGNPNGTQNNSTRWPAFRSTDQKYLTLNAESPKVYTKLRAQQCRFWTLFFPKVLEMTGNIDEAEREWRAGFYRWNNYMMDWKNQFNDYTSKKESCAGL

SEQ ID NO: 256 - protein, 574 aa, Panthera tigris tigris
  Bengal tiger butyrylcholinesterase mature O62761
EEDIIITTKNGKVRGMNLPVLDGTVTAFLGIPYAQPPLGRLRFKKPQFLTKWSDIWNATKHANSCYQNADQSFPGFPGSEMWNPNTDLSEDCLYLNVWSPTPKPKNATVMIWIYGGGFQTGTSSLPVYDGKFLARVERVIVVSMNYRVGALGFLALPGNPEIPGNMGLFDQQLALQWVQKNIAAFGGNPKSVTLFGESAGAGSVSLHLLSPRSQPLFTRAILQSGSSNAPWAVMSLDEAKNRTLTLAKFIGCSKENDTEIIKCLRNKDPQEILLNELLVVPSDTLLSVNFGPVVDGDFLTDMPDTLLQLGQFKKTQILVGVNKDEGTAFLVYGAPGFSKDNDSIITRKEFQEGLKIYFPGVSEFGREAILFYYVDLLDDQRAEKYREALDDVLGDYNIICPALEFTTKFSELGNNAFFYYFEHRSSQLPWPEWMGVMHGYEIEFVFGLPLERRVNYTRAEEILSRSIMNYWANFAKYGNPNGTQNNSTRWPAFRSTDQKYLTLNAESPKVYTKLRAQQCRFWTLFFPKVLEMTGNIDEAEREWRAGFYRWNNYMMDWKNQFNDYTSKKESCAGL

SEQ ID NO: 257 - DNA, 2416 bp, Homo sapiens; identical to SEQ ID NO: 208
  human butyrylcholinesterase DNA  M16541

SEQ ID NO: 258 - protein, 355 aa, Homo sapiens [sequence omitted]

SEQ ID NO: 259 - protein, 359 aa, Oryctolagus cuniculus
  rabbit PON1 P27170
MAKLTALTLLGLGLALFDGQKSSFQTRFNVHREVTPVELPNCNLVKGIDNGSEDLEILPNGLAFISAGLKYPGIMSFDPDKPGKILLMDLNEKDPVVLELSITGSTFDLSSFNPHGISTFTDEDNIVYLMVVNHPDSKSTVELFKFQEKEKSLLHLKTIRHKLLPSVNDIVAVGPEHFYATNDHYFIDPYLKSWEMHLGLAWSFVTYYSPNDVRVVAEGFDFANGINISPDGKYVYIAELLAHKIHVYEKHANWTLTPLKSLDFNTLVDNISVDPVTGDLWVGCHPNGMRIFYYDPKNPPASEVLRIQDILSKEPKVTVAYAENGTVLQGSTVAAVYKGKMLVGTVFHKALYCELSQAN

SEQ ID NO: 260 - protein, 355 aa, Mus musculus
  mouse PON1 P52430
MAKLLALTLVGLVLALYKNHRSSYQTRLNAFREVTPVELPNCNLVKGIETGAEDLEILPNGLTFFSTGLKYPGIKSFDPSKPGKILLMDLNKKEPAVSELEIIGNTLDISSFNPHGISTFTDEDNTVYLLVVNHPDSSSTVEVFKFQEEERSLLHLKTITHELLPSINDIAAIGPESFYATNDHYFADPYLRSWEMYLGLSWSNVVYYSPDKVQVVAEGFDFANGIGISLDGKYVYIAELLAHKIHVYEKHANWTLTPLKVLNFDTLVDNISVDPVTGDLWVGCHPNGMRIFFYDAENPPGSEVLRIQNILSEDPKITVVYAENGTVLQGTTVASVYKGKLLIGTVFHKALYCDL

SEQ ID NO: 261 - protein, 355 aa, Rattus norvegicus
  rat PON1 P55159
MAKLLGLTLVGLVLALYKNHRSSYQTRLNAFREVTPVDLPNCTLVKGIEAGAEDLEILPNGLTFFSTGLKYPGIKSFDPSKPGKILLMDLNEKEPAVSELAIMGNTLDMSSFNPHGISTFIDEDNTVYLLVVSHPDSSSTVEVFKFQEEERSLLHLKTITHELLPSINDIAAVGPESFYATNDHYFADPYLRSWEMYLGLSWSNVVYYSPDKVRVVADGFDFANGIGISLDGKYVYIAELLAHKIHVYEKHANWTLTPLKVLSFDTLVDNISVDPVTGDLWVGCHPNGMRIFFYDSENPPGSEVLRIQSILSEDPKVTVVYAENGTVLQGTTVAAVYKGKLLIGTVFHRALCCDL

SEQ ID NO: 262 - protein, 355 aa, Sus scrofa
  pig PON1 precursor
  SIGNAL (1)...(15): signal sequence
MAKLMVLTLLGLGLALFRDHRSSYLTRMNAFREIKPVELPNCKLVKGIESGSEDLEVLHNGLAFISTGLKYPGIKVFEPDKPGKILLMDLNEEDPTVLELRITGSNFDLSSFNPHGISTFTDEDNTVYLLVVSHPDLKSTVELFKFQEEEKTLLHLKTIKHKLLPKINDIVAVGPEHFYATNDHYFVDTYLTFWEMYLGLAWSYAVYYSPNEVQVMASGFDFANGINISPDGKYVYIAESMAHKIHVYEKHANWTLTPLKSLDFDTIVDNISVDPVTGDLWIGCHPNGMKVFFYDPENPPGSEVLRIQNILTEEPKVTVVYADNGTVLQASTTASVYKGKLLIGTVIHRALYCEL

SEQ ID NO: 263 - protein, 355 aa, Bos taurus
  cow PON1 precursor
  SIGNAL (1)...(15): signal sequence
MAKLLVLTLLGLGLAFFRDYRSSYLARMNASREVKSVELPNCKLTKGIETGAEDLEILPNGLAFISSGLRYPGVKSFEPDKPGKILLMDLNKEDPTVLELKMTGSNFDASSFNPHGISTFTDEDNTVYLLVVSHPDVKSTVELFKFQEEEKSLLHLKTIKHELLPNLNDLVAVGREHFYATNDHYFVDQYMRSWELYLGLAWSNVVYYSPDDVRVVASGFDFANGISMSPDRKYVYIAELLAHKIHVYEKHANWTLTPLKSLDCDTLVDNISVDPVTGDLWVGCHPNGMKIFSYDPENPPGSEVLQIQNILAEEPKVTVVYAEDGKVLHGSTVASVYKGKMLVGTVFQKALYCEF

SEQ ID NO: 264 - protein, 354 aa, Homo sapiens
  human PON2 isoform 2 Q15165
MGRLVAVGLLGIALALLGERLLALRNRLKASREVESVDLPHCHLIKGIEAGSEDIDILPNGLAFFSVGLKFPGLHSFAPDKPGGILMMDLKEEKPRARELRISRGFDLASFNPHGISTFIDNDDTVYLFVVNHPEFKNTVEIFKFEEAENSLLHLKTVKHELLPSVNDITAVGPAHFYATNDHYFSDPFLKYLETYLNLHWANVVYYSPNEVKVVAEGFDSANGINISPDDKYIYVADILAHEIHVLEKHTNMNLTQLKVLELDTLVDNLSIDPSSGDIWVGCHPNGQKLFVYDPNNPPSSEVLRIQNILCEKPTVTTVYANNGSVLQGSSVASVYDGKLLIGTLYHRALYCEL

SEQ ID NO: 265 - protein, 354 aa, Mus musculus
  mouse PON2 Q62086
MGRMVALSLLGIGLALLGERFLALRSRLKASREVESVDLPNCHLIKGIETGAEDIDILPNGLAFFSVGLKFPGLHSFAPDKPGGILMMDLKDERPRALELRVSWGFDLASFNPHGISTFIDDDDTVYLFVVNHPQFKSTVEIFKFQEEENSLLHLKTIKHELLPSVNDIIAVGPTHFYATNDHYFSDPFLKYLETYLNLHWANVVYYSPEEVKLVAEGFDSANGINISPDKKYVYVADILAHEIHVLEKQPNMNLTQLKVLQLGTLVDNLSIDPSSGDIWVGCHPNGQRLFVYHPNHPPASEVLRIQNILSEKPSVTTVYINNGSVLQGSSVATIYDRKLLVGTLYQKALYCEL

SEQ ID NO: 266 - protein, 354 aa, Gallus gallus
  chicken PON2 Q90952
MGKVLAAALVGIAAALAAERLLAFRNRLNATREVDPVALPNCYLIKGIETGSEDIDILPNGLAFISSGLKYPGLKSFAPDKPGEIFLMDLNEKKPKASELRISRGFDVGSFNPHGISTYIDKDDTVYLFVVNHPHQKSTVELFKFMEDDNSLVHLKTIRHDLLTSVNDVVAVGPDSFYATNDHYFYDFILMFLEMYLGLTWSNVVYYSPKEVKEVAAGFYSANGINISPDKKYIYIADILDHNVHVMEKHADWNLTHVKTLQLDTLADNLSVDPDTGDIWTGCHPNGMKLFYDDPDNPPASEVLRIQNILAEQPTVTRVYAENGSVLQGTSVATVYDGKLLIGTVFHRALYCEL

SEQ ID NO: 267 - protein, 354 aa, Meleagris gallopavo
  turkey PON2 Q91090
MGKVLAAALIGIAAALAAERLLAFRNRLNATREVDPVALPNCRLIKGIEAGSEDIDILPNGLAFISSGLKYPGLKSLAPDKPGEIFLMDLNEKKPKASELRISRGFDLGSFNPHGISTYIDKDDTVYLFVVNHPHQKSTVELFKFMEEDNSLLHLKTIRHDLLTSVNDVVAVGPDSFYATNDHYFYDFILMFLEMYLGLTWSNVVYYSPKEVKEVAAGFYSANGINISPDKKYIYIADIFDHNVHVMEKHADWNLTHVKTLQLDTLADNLSVDPDTGDIWTGCHPNGMKLFYNDPDNPPASEVLRIQNILAEQPTVTRVYAENGSVLQGTSVATVYNRKLLIGTVYHRALYCEL

SEQ ID NO: 268 - protein, 354 aa, Canis familiaris
  dog PON2 P54832
MGRLLGVGLLGDRWRSWGERLLALRNRLKASREVESVDLPNCHLIKGIEAGADDIDILPNGLAFFSVGLKCPGLHSFSPDKPGGILMMDLKKENPRALELRISRGFNLASFNPHGISTFIDSDDTVYLFVVNHPEFKNTVEIFKFEEEENSLLHLKTIKHELLPSVNDIIAVGPAHFYATNDHYFSDPFLKYLETYLNLHWANVVYYSPDEVKVVAEGFDAANGINISPDKKYIYVADILAHEIHVLEKHPNMNLTQLKVLKLDTLVDNLSIDPSSGDILVGCHPNGQKLFIYDPNNPPSSEVLRIQNILCEKPTVTTVYANNGSVLQGSSVASVYDRKLLIGTLYHRALYCEL

SEQ ID NO: 269 - protein, 354 aa, Bos taurus
  cow PON2 Q58DS7
MGRLLALSLLGIALALLGERLLALRNRLKASREVESVDLPNCHLIKGIEAGAEDIDILPNGLAFFSVGLKCPGLHSFAPDKPGGILMMDLNEENPRALELRVSRGFNLASFNPHGISTFIDSDDTVYLFVVNHPEFKNTVEIFKFEEEENSLLHLKTIKHELLPSVNDIIAVGPEHFYATNDHYFSDPFLKYLETYLNLHWTNVVYYSPNEVKVVAEGFDSANGINISPDKKYIYVADILAHEIHVLEKHPNMNLTQLKVLKLDTLVDNLSIDPSSGDVLVGCHPNGQKLFVYDPKNPPSSEVLRIQNILSEKPTVTTVYANNGSVLQGSSVASVYDKKLLIGTLYHRALYCEL

SEQ ID NO: 270 - protein, 354 aa, Rattus norvegicus
  rat PON2 Q6AXM8
MGRLVALSLLGIGLALLGERFLALRSRLKASREVESVDLPNCRLIKGIETGAEDIDILPNGLAFFSVGLKFPGLHSFAPDKPGGILMMDLKEEKPRALELRVSWGFDLASFNPHGISTFIDDDDTVYLFVVNHPEFKNTVEIFKFQEEENSLLHLKTIKHELLPSVNDVIAVGPSHFYATNDHYFSDPFLKYLETYLNLRWANVVYYSPEEVKLVAEGFDSANGINISPDKKYVYVADILAHEIHVLEKQPNMNLTQLKVLQLGTLVDNLSIDPSSGDIWVGCHPNGQKLFVYDPNHPPSSEVLRIQNILSEKPSVTTVYINNGSVLQGSSVATIYDRKLLVGTLYQRALYCEL

SEQ ID NO: 271 - protein, 354 aa, Homo sapiens
  human PON3 Q15166
MGKLVALVLLGVGLSLVGEMFLAFRERVNASREVEPVEPENCHLIEELESGSEDIDILPSGLAFISSGLKYPGMPNFAPDEPGKIFLMDLNEQNPRAQALEISGGFDKELFNPHGISIFIDKDNTVYLYVVNHPHMKSTVEIFKFEEQQRSLVYLKTIKHELLKSVNDIVVLGPEQFYATRDHYFTNSLLSFFEMILDLRWTYVLFYSPREVKVVAKGFCSANGITVSADQKYVYVADVAAKNIHIMEKHDNWDLTQLKVIQLGTLVDNLTVDPATGDILAGCHPNPMKLLNYNPEDPPGSEVLRIQNVLSEKPRVSTVYANNGSVLQGTSVASVYHGKILIGTVFHKTLYCEL

SEQ ID NO: 272 - protein, 354 aa, Mus musculus
  mouse PON3 Q62087
MGKLVALTLLGACLALIGERLLNFRERVSTTREIKATEPQNCHLIEGLENGSEDIDILPSGLAFISTGLKYPGMPAFAPDKPGRIFLMDLNEQNPEAQALEISGGLDQESLNPHGISTFIDKDNTAYLYVVNHPNMDSTVEIFKFEEQQRSLIHLKTLKHELLKSVNDIVVLGPEQFYATRDHYFTSYFLVLLEMILDPHWTSVVFYSPKEVKVVAQGFSSANGITVSLDQKFVYVADVTAKNIHIMKKHDNWDLTPVKVIQLGTLVDNLTVDPATGDILAGCHPNPMKLLIYNPEDPPGSEVLRIQDSLSDKPRVSTLYANNGSVLQGSTVASVYHKRMLIGTIFHKALYCDL

SEQ ID NO: 273 - protein, 354 aa, Rattus norvegicus
  rat PON3 Q68FP2
MGKLVALTVLGASLALLGERLLNFRERVSTSREIKPTEPQNCHLIEGLENGSEDIDILPSGLAFISTGLKYPGMPSFAPDKPGRIFLMDLNEPYPKAQALEISDGFDQDSLNPHGISTFIDKDNTVYLYAVNHPHMDSTVEIFKFEEQPRSLVHLKTIKHELFESVNDIVVLGPEQFYATRDHYFTSHFLVLLEMILDPHWTSVLFYSPKEVKVVAQGFSSANGITVSLDQKYVYVADVTAKNIHIMKKHNNWDLTPVKVIQLGTLVDNLTVDPATGDILAGCHPNPMKLLIYNPEDPPGSEVLRIQDPLSDNPRVSTLYSNNGSVLQGSTVASVYHKKMLIGTIFHKALYCEL

SEQ ID NO: 274 - protein, 354 aa, Oryctolagus cuniculus
  rabbit PON3 Q9BGN0
MAKLLLLTLLGASLAFVGERLLAFRNSFGAVQELEPVEPQNCVLIEGLENGSEDIDILPSGLAFISSGLKYPGMPNFAPDEPGKIFLIDMNEKNPRAQELEISNGFEKESFNPHGISTFIDKDHTVYLYVVNHPHMKSTVEIFKFEEQQRSLVHLKTIKHELLKSVNNIVVLGPEQFYATRDHYFTNYVLALLEMFLDLHWTSVLFYSPKEVKVVAKGFSSANGITVSLDKKYVYVADATAKNVHVMEKHDNWDLTELKVIHLDTLVDNLSVDPATGDILAGCHPNGMKLLNYNPEDPPGSEVLRIQNVLSEKPRVSTVYTNDGSVLQGSTVASVYQGKILIGTIFHKTLYCVL

SEQ ID NO: 275 - protein, 354 aa, Bos taurus
  cow PON3 Q1JQD3
MGKLMALILLGAGLALVGERFLTLRERMNAYREVESVESQNCHLIEGIENGSEDIDILPSGLAFISNGLKYPGMPDLAPDEPGRIFLMDLNEQNPRVQELNISDGFDKASFNPHGMSTFIDKDQTVYLYVVNHPHMDSTVEIFKFEEQQRSLVYLKTIKHELLKSVNDIVVLGPEQFYATRDHYFTNFFLVLLELFMDLRWTQVLFYSPKEVKVVARGFSSANGITISLDKKYIYVADVSDKNIHVMKIHDNWDLTQLKVIQLDTLVDNLTVDPDTGDILAGCHPNAIKLLMYNTEDPPGSEALRIRNALSEKPMISTMYANNGSVLQGSSVASVYRGKLLIGTVFHKALYCEL

SEQ ID NO: 276 - protein, 354 aa, Sus scrofa
  pig PON3 Q195H3
MGKLVALTLLGAFLALIGERLVALREKTNAYREVEPVEPQNCHLIEGLENGSEDIDILPSGLAFISTGLNYPGMVNFAPDKPGQIFLMDLNEPNPRVQALNISDGFDKASFNPHGISTFIDKDHTVYLYVVNHPHMESTVEIFKFEEQQRSLIHLKTIKHELLKSVNDIVVLGAEQFYATRDHYFTNFFLATLEIVLDLHWTYVLFYSPREVKVVAKGFNSANGITVSSDKKYIYVADVFDKNIHVMKKHDNWDLTPLKVIQLDTLVDNLTIDPDTGDIWAGCHPNAIKLVIYNTEDPPGSEVLRIQNALSEKPRISTEYANTGSVLQGSSVASVYKGKLLIGTVFHKALYCVL

SEQ ID NO: 277 - protein, 314 aa, Sulfolobus solfataricus
  Sulfolobus solfataricus aryldialkylphosphatase Q97VT7
MRIPLVGKDSIESKDIGFTLIHEHLRVFSEAVRQQWPHLYNEDEEFRNAVNEVKRAMQFGVKTIVDPTVMGLGRDIRFMEKVVKATGINLVAGTGIYIYIDLPFYFLNRSIDEIADLFIHDIKEGIQGTLNKAGFVKIAADEPGITKDVEKVIRAAAIANKETKVPIITHSNAHNNTGLEQQRILTEEGVDPGKILIGHLGDTDNIDYIKKIADKGSFIGLDRYGLDLFLPVDKRNETTLRLIKDGYSDKIMISHDYCCTIDWGTAKPEYKPKLAPRWSITLIFEDTIPFLKRNGVNEEVIATIFKENPKKFFS

SEQ ID NO: 278 - protein, 365 aa, Brevundiomonas diminuta
  Brevundiomonas diminuta parathion hydrolase P0A434
  SIGNAL (1)...(29): signal sequence
MQTRRVVLKSAAAAGTLLGGLAGCASVAGSIGTGDRINTVRGPITISEAGFTLTHEHICGSSAGFLRAWPEFFGSRKALAEKAVRGLRRARAAGVRTIVDVSTFDIGRDVSLLAEVSRAADVHIVAATGLWFDPPLSMRLRSVEELTQFFLREIQYGIEDTGIRAGIIKVATTGKATPFQELVLKAAARASLATGVPVTTHTAASQRDGEQQAAIFESEGLSPSRVCIGHSDDTDDLSYLTALAARGYLIGLDHIPHSAIGLEDNASASALLGIRSWQTRALLIKALIDQGYMKQILVSNDWLFGFSSYVTNIMDVMDRVNPDGMAFIPLRVIPFLREKGVPQETLAGITVTNPARFLSPTLRAS

SEQ ID NO: 279 - protein, 365 aa, Sphingobium fuliginis; identical to SEQ ID NO: 278
  Sphingobium fuliginis parathion hydrolase P0A433
  SIGNAL (1)...(29): signal sequence

SEQ ID NO: 280 - protein, 315 aa, Sulfolobus acidocaldarius
  Sulfolobus acidocaldarius parathion hydrolase Q4J6Z8
MTKIPLVGKGEISPGEMGFTLIHEHLRVFSEPVRYQWPHLYNEDEELKNAVNEVKTIMSYGVKTIVDPTVMGLGRDIRFSEKVVKETGINVIAATGLYTYTDLPFFFNGRSLEEIAELLIHDIKKGIQGTNNRAGFIKVAADEPGITRDVERAIRAAAIAQKETNVPIITHSNAHNGTGLEQQRILMEEGVDPGRVLIGHLGDTDNVDYIKKIADKGSFVGLDRYGLDLFLPIDKRNEVLLKLIKDGYLDRIMVSQDYCCTIDWGIAKPEYKPKLAPKWSMSLIFTDVIPSIKRAGVTDEQLHVIFVKNPARLFS

SEQ ID NO: 281 - protein, 96 aa, Sulfolobus acidocaldarius
  Sulfolobus acidocaldarius parathion hydrolase Q4J6G8
MLEVNLKILDVLRGYPNYIVQIEGNNVTIDYVPPSISEASGVDVDEDTKPIIRIWGIIDGEKLKILKASVIKGEESRDLDESEIQFWLSYVDQGGG

SEQ ID NO: 282 - protein, 292 aa, Escherichia coli
  Escherichia coli phosphotriesterase homology protein P45548
MSFDPTGYTLAHEHLHIDLSGFKNNVDCRLDQYAFICQEMNDLMTRGVRNVIEMTNRYMGRNAQFMLDVMRETGINVVACTGYYQDAFFPEHVATRSVQELAQEMVDEIEQGIDGTELKAGIIAEIGTSEGKITPLEEKVFIAAALAHNQTGRPISTHTSFSTMGLEQLALLQAHGVDLSRVTVGHCDLKDNLDNILKMIDLGAYVQFDTIGKNSYYPDEKRIAMLHALRDRGLLNRVMLSMDITRRSHLKANGGYGYDYLLTTFIPQLRQSGFSQADVDVMLRENPSQFFQ

SEQ ID NO: 283 - protein, 350 aa, Drosophila melanogaster
  fruit fly phosphotriesterase-related protein Q9VHF2
MSTVQTVLGTITPNLLGRTLTHEHVALDFEHFYRPPPPDFESELKAKISMSTLGYVRLYPYSSKENVRFYDGEALEAAKKDVLLYKKHGGGSIVENSSYGLKRNLEFIVELAKSTGVHFIAGTGHYIHAMQDASHASLTVEQMSDLYSKDIITGLQVNGKVVKCGFIGEVASVYPIHDFEKNAIKAAGEIQEVLGCGVSMHPHRVTKAPFEIMRLYLEAGGRADKCVMSHLDRTIFDIDELLEFAKLGCYIQYDLFGTECSFYQLNTSVDMISDGQRIDNLIKLIKEGLVDKLLMSHDIHTKHRLTSYGGHGYHHIHTNILPRMFDRGVTLEQVEQMTVTNPAKWLAFDP

SEQ ID NO: 284 - protein, 517 aa, Alteromonas sp.
  Alteromonas sp. prolidase Q44238
MNKLAVLYAEHIATLQKRTREIIERENLDGVVFHSGQAKRQFLDDMYYPFKVNPQFKAWLPVIDNPHCWIVANGTDKPKLIFYRPVDFWHKVPDEPNEYWADYFDIELLVKPDQVEKLLPYDKARFAYIGEYLEVAQALGFELMNPEPVMNFYHYHRAYKTQYELACMREANKIAVQGHKAARDAFFQGKSEFEIQQAYLLATQHSENDNAYGNIVALNENCAILHYTHFDRVAPATHRSFLIDAGANFNGYAADITRTYDFTGEGEFAELVATMKQHQIALCNQLAPGKLYGELHLDCHQRVAQTLSDFNIVDLSADEIVAKGITSTFFPHGLGHHIGLQVHDVGGFMADEQGAHQEPPEGHPFLRCTRKIEANQVFTIEPGLYFIDSLLGDLAATDNNQHINWDKVAELKPFGGIRIEDNIIVHEDSLENMTRELRARLTTHSLRGLSAPQFSINDPAVMSEYSYPSEPLSYEEEIKKSTFIVHVRTRRILVRRRTLSPILIAVTPMPAITAGLM

SEQ ID NO: 285 - protein, 493 aa, Homo sapiens
  human prolidase P12955
MAAATGPSFWLGNETLKVPLALFALNRQRLCERLRKNPAVQAGSIVVLQGGEETQRYCTDTGVLFRQESFFHWAFGVTEPGCYGVIDVDTGKSTLFVPRLPASHATWMGKIHSKEHFKEKYAVDDVQYVDEIASVLTSQKPSVLLTLRGVNTDSGSVCREASFDGISKFEVNNTILHPEIVECRVFKTDMELEVLRYTNKISSEAHREVMKAVKVGMKEYELESLFEHYCYSRGGMRHSSYTCICGSGENSAVLHYGHAGAPNDRTIQNGDMCLFDMGGEYYCFASDITCSFPANGKFTADQKAVYEAVLRSSRAVMGAMKPGVWWPDMHRLADRIHLEELAHMGILSGSVDAMVQAHLGAVFMPHGLGHFLGIDVHDVGGYPEGVERIDEPGLRSLRTARHLQPGMVLTVEPGIYFIDHLLDEALADPARASFLNREVLQRFRGFGGVRIEEDVVVTDSGIELLTCVPRTVEEIEACMAGCDKAFTPFSGPK

SEQ ID NO: 286 - protein, 314 aa, Loligo vulgaris [sequence omitted]

SEQ ID NO: 287 - protein, 517 aa, Altermonas sp.; identical to SEQ ID NO: 284
  Alteromonas sp. Xaa-Pro dipeptidase (diisopropyl-fluorophosphatase) Q44238

SEQ ID NO: 288 - protein, 440 aa, Pseudoalteromonas haloplanktis
  Pseudoalteromonas haloplanktis Xaa-Pro dipeptidase (diisopropyl-fluorophosphatase) P77814
MEKLAVLYAEHIATLQQRTRTICEQEGLEGLVIHSGQAKRQFLDDMYYPFKVNPHFKAWLPVIDNPHCWIVVNGSDKPKLIFYRPIDFWHKVPDEPRDFWAEYFDIELLLQPDQVEKLLPYDKAKFAYIGEYLEVAQALGFSIMNPEPVLNYIHYHRAYKTQYELECLRNANRIAVDGHKAARDAFFNGGSEFDIQQAYLMATRQSENEMPYGNIVALNENCAILHYTHFEPKAPQTHNSFLIDAGANFNGYAADITRTYDFKKQGEFADLVNAMTAHQIELGKSLKPGLLYGDLHIDCHNRIAQLLSDFDIVKLPAAEIVERQITSTFFPHGLGHHLGAQVHDVGGFMRDETGAHQAPPEGHPFLRCTRLIEKNQVFTIEPGLYFIDSLLGDLAQTDNKQFINWEKVEAFKPFGGIRIEDNIIVHEDSLENMTRNLLLD

SEQ ID NO: 289 - protein, 441 aa, Marinomonas mediterranea
  Marinomonas mediterranea Xaa-Pro dipeptidase (diisopropyl-fluorophosphatase)
MDTSLYQSHLNTLLSRYEAALDHFKLDAIVLSAGRKSYYFNDDLSPAFHPFSGIQQWLPFPVGEDTFVVIRASSKPELVWPIKNDFWHAPNSIPKGDWQKNWTITEVKDTEAWKSTIKGNFAALGPEHITNASSFDNSEVNNSKINKVSAFIDFDKAIKTPYEVECIRAANHAAVAGHLEAERAFREGASELEIHLAYLKASTQSAFEEPYPSIIGLNEHSAILHYEHKNTVAPSSSRSFLIDAGASKNGYASDITRTYAAQENDFSALIASLEKLQLSLCGKVVNNQSYIELHQQTLTGIAAILKEHDICSLSIEEQVERSIVQTFFPHGLGHLLGLQVHDLGGKQVDRNGTILTPSADMPFLRMTRGLETGMVVTIEPGLYFIPMLIEKTLATQVNHGLNLKKIESLRPYGGIRIEDNVLVTNDGQPNNLTRESFVRFQ

SEQ ID NO: 290 - protein, 299 aa, Rattus norvegicus
  rat Senescence marker protein 30 (Regucalcin, gluconolactonase) Q03336
MSSIKIECVLRENYRCGESPVWEEASKCLLFVDIPSKTVCRWDSISNRVQRVGVDAPVSSVALRQSGGYVATIGTKFCALNWEDQSVFILAMVDEDKKNNRFNDGKVDPAGRYFAGTMAEETAPAVLERHQGSLYSLFPDHSVKKYFDQVDISNGLDWSLDHKIFYYIDSLSYTVDAFDYDLPTGQISNRRTVYKMEKDEQIPDGMCIDVEGKLWVACYNGGRVIRLDPETGKRLQTVKLPVDKTTSCCFGGKDYSEMYVTCARDGMSAEGLLRQPDAGNIFKITGLGVKGIAPYSYAG

SEQ ID NO: 291 - protein, 574 aa, Homo sapiens
  human butyrylcholinesterase mature H variant V142M
EDDIIIATKNGKVRGMNLTVFGGTVTAFLGIPYAQPPLGRLRFKKPQSLTKWSDIWNATKYANSCCQNIDQSFPGFHGSEMWNPNTDLSEDCLYLNVWIPAPKPKNATVLIWIYGGGFQTGTSSLHVYDGKFLARVERVIVMSMNYRVGALGFLALPGNPEAPGNMGLFDQQLALQWVQKNIAAFGGNPKSVTLFGESAGAASVSLHLLSPGSHSLFTRAILQSGSFNAPWAVTSLYEARNRTLNLAKLTGCSRENETEIIKCLRNKDPQEILLNEAFVVPYGTPLSVNFGPTVDGDFLTDMPDILLELGQFKKTQILVGVNKDEGTAFLVYGAPGFSKDNNSIITRKEFQEGLKIFFPGVSEFGKESILFHYTDWVDDQRPENYREALGDVVGDYNFICPALEFTKKFSEWGNNAFFYYFEHRSSKLPWPEWMGVMHGYEIEFVFGLPLERRDNYTKAEEILSRSIVKRWANFAKYGNPNETQNNSTSWPVFKSTEQKYLTLNTESTRIMTKLRAQQCRFWTSFFPKVLEMTGNIDEAEWEWKAGFHRWNNYMMDWKNQFNDYTSKKESCVGL

SEQ ID NO: 292 - protein, 574 aa, Homo sapiens
  human butyrylcholinesterase mature J variant E497V
EDDIIIATKNGKVRGMNLTVFGGTVTAFLGIPYAQPPLGRLRFKKPQSLTKWSDIWNATKYANSCCQNIDQSFPGFHGSEMWNPNTDLSEDCLYLNVWIPAPKPKNATVLIWIYGGGFQTGTSSLHVYDGKFLARVERVIVVSMNYRVGALGFLALPGNPEAPGNMGLFDQQLALQWVQKNIAAFGGNPKSVTLFGESAGAASVSLHLLSPGSHSLFTRAILQSGSFNAPWAVTSLYEARNRTLNLAKLTGCSRENETEIIKCLRNKDPQEILLNEAFVVPYGTPLSVNFGPTVDGDFLTDMPDILLELGQFKKTQILVGVNKDEGTAFLVYGAPGFSKDNNSIITRKEFQEGLKIFFPGVSEFGKESILFHYTDWVDDQRPENYREALGDVVGDYNFICPALEFTKKFSEWGNNAFFYYFEHRSSKLPWPEWMGVMHGYEIEFVFGLPLERRDNYTKAEEILSRSIVKRWANFAKYGNPNETQNNSTSWPVFKSTVQKYLTLNTESTRIMTKLRAQQCRFWTSFFPKVLEMTGNIDEAEWEWKAGFHRWNNYMMDWKNQFNDYTSKKESCVGL

SEQ ID NO: 293 - protein, 574 aa, Homo sapiens
  human butyrylcholinesterase mature K variant A539T
EDDIIIATKNGKVRGMNLTVFGGTVTAFLGIPYAQPPLGRLRFKKPQSLTKWSDIWNATKYANSCCQNIDQSFPGFHGSEMWNPNTDLSEDCLYLNVWIPAPKPKNATVLIWIYGGGFQTGTSSLHVYDGKFLARVERVIVVSMNYRVGALGFLALPGNPEAPGNMGLFDQQLALQWVQKNIAAFGGNPKSVTLFGESAGAASVSLHLLSPGSHSLFTRAILQSGSFNAPWAVTSLYEARNRTLNLAKLTGCSRENETEIIKCLRNKDPQEILLNEAFVVPYGTPLSVNFGPTVDGDFLTDMPDILLELGQFKKTQILVGVNKDEGTAFLVYGAPGFSKDNNSIITRKEFQEGLKIFFPGVSEFGKESILFHYTDWVDDQRPENYREALGDVVGDYNFICPALEFTKKFSEWGNNAFFYYFEHRSSKLPWPEWMGVMHGYEIEFVFGLPLERRDNYTKAEEILSRSIVKRWANFAKYGNPNETQNNSTSWPVFKSTEQKYLTLNTESTRIMTKLRAQQCRFWTSFFPKVLEMTGNIDETEWEWKAGFHRWNNYMMDWKNQFNDYTSKKESCVGL

SEQ ID NO: 294 - protein, 586 aa, Homo sapiens
  human acetylcholinesterase isoform H mature
EGREDAELLVTVRGGRLRGIRLKTPGGPVSAFLGIPFAEPPMGPRRFLPPEPKQPWSGVVDATTFQSVCYQYVDTLYPGFEGTEMWNPNRELSEDCLYLNVWTPYPRPTSPTPVLVWIYGGGFYSGASSLDVYDGRFLVQAERTVLVSMNYRVGAFGFLALPGSREAPGNVGLLDQRLALQWVQENVAAFGGDPTSVTLFGESAGAASVGMHLLSPPSRGLFHRAVLQSGAPNGPWATVGMGEARRRATQLAHLVGCPPGGTGGNDTELVACLRTRPAQVLVNHEWHVLPQESVFRFSFVPVVDGDFLSDTPEALINAGDFHGLQVLVGVVKDEGSYFLVYGAPGFSKDNESLISRAEFLAGVRVGVPQVSDLAAEAVVLHYTDWLHPEDPARLREALSDVVGDHNVVCPVAQLAGRLAAQGARVYAYVFEHRASTLSWPLWMGVPHGYEIEFIFGIPLDPSRNYTAEEKIFAQRLMRYWANFARTGDPNEPRDPKAPQWPPYTAGAQQYVSLDLRPLEVRRGLRAQACAFWNRFLPKLLSATASEAPSTCPGFTHGEAAPRPGLPLPLLLLHQLLLLFLSHLRRL

SEQ ID NO: 295 - protein, 572 aa, Homo sapiens
  human acetylcholinesterase isoform R Mature
EGREDAELLVTVRGGRLRGIRLKTPGGPVSAFLGIPFAEPPMGPRRFLPPEPKQPWSGVVDATTFQSVCYQYVDTLYPGFEGTEMWNPNRELSEDCLYLNVWTPYPRPTSPTPVLVWIYGGGFYSGASSLDVYDGRFLVQAERTVLVSMNYRVGAFGFLALPGSREAPGNVGLLDQRLALQWVQENVAAFGGDPTSVTLFGESAGAASVGMHLLSPPSRGLFHRAVLQSGAPNGPWATVGMGEARRRATQLAHLVGCPPGGTGGNDTELVACLRTRPAQVLVNHEWHVLPQESVFRFSFVPVVDGDFLSDTPEALINAGDFHGLQVLVGVVKDEGSYFLVYGAPGFSKDNESLISRAEFLAGVRVGVPQVSDLAAEAVVLHYTDWLHPEDPARLREALSDVVGDHNVVCPVAQLAGRLAAQGARVYAYVFEHRASTLSWPLWMGVPHGYEIEFIFGIPLDPSRNYTAEEKIFAQRLMRYWANFARTGDPNEPRDPKAPQWPPYTAGAQQYVSLDLRPLEVRRGLRAQACAFWNRFLPKLLSATGMQGPAGSAGRRGVGARQCNPSLLPLASE

SEQ ID NO: 296 - protein, 495 aa, Homo sapiens
  human acetylcholinesterase isoform 4 Mature
EGREDAELLVTVRGGRLRGIRLKTPGGPVSAFLGIPFAEPPMGPRRFLPPEPKQPWSGVVDATTFQSVCYQYVDTLYPGFEGTEMWNPNRELSEDCLYLNVWTPYPRPTSPTPVLVWIYGGGFYSGASSLDVYDGRFLVQAERTVLVSMNYRVGAFGFLALPGSREAPGNVGLLDQRLALQWVQENVAAFGGDPTSVTLFGESAGAASVGMHLLSPPSRGLFHRAVLQSGAPNGPWATVGMGEARRRATQLAHLVGCPPGGTGGNDTELVACLRTRPAQVLVNHEWHVLPQESVFRFSFVPVVDGDFLSDTPEALINAGDFHGLQLAGRLAAQGARVYAYVFEHRASTLSWPLWMGVPHGYEIEFIFGIPLDPSRNYTAEEKIFAQRLMRYWANFARTGDPNEPRDPKAPQWPPYTAGAQQYVSLDLRPLEVRRGLRAQACAFWNRFLPKLLSATDTLDEAERQWKAEFHRWSSYMVHWKNQFDHYSKQDRCSDL

SEQ ID NO: 297 - protein, 331 aa, Plesiomonas sp.
  methyl parathion hydrolase  Plesiomonas sp. strain M6  gi|13173397
  SIGNAL (1)...(35): signal sequence
MPLKNRLLARLSCVAAVVAATAAVAPLTLVSTAHAAAPQVRTSAPGYYRMLLGDFEITALSDGTVALPVDKRLNQPAPKTQSALAKSFQKAPLETSVTGYLVNTGSKLVLVDTGAAGLFGPTLGRLAANLKAAGYQPEQVDEIYITHMHPDHVGGLMVGEQLAFPNAVVRADQKEADFWLSQTNLDKAPDDESKGFFKGAMASLNPYVKAGKFKPFSGNTDLVPGIKALASHGHTPGHTTYVVESQGQKLALLGDLILVAAVQFDDPSVTNQLDIDGKSAAVERKKAFADAAKGGYLIAASHLPFPGIGHIRAEGKGYRFVPVNYSVVNPK

SEQ ID NO: 298 - protein, 365 aa, Flavobacterium sp
  Flavobacterium sp. MTCC 2495 organophosphorus hydrolase AAV39527.1
MQTRRVVLKSAAAAGTLLGGLAGCASVAGSIGTGDRINTVRGPITISEAGFTLTHEHICGSSAGFLRAWPEFFGSRKALAEKAVRGLRRARAAGVRTIVDVSTFDIGRDVSLLAEVSRAADVHIVAATGLWFDPPLSMRLRSVEELTQFFLREIQYGIKDTGIRAGIIKVATTGKATPFQELVLKAAARASLATGVPVTTHTAASQRDGEQQAAIFESEGLSPSRVCIGHSDDTDDLSYLTALAARGYLIGLDHIPHSAIGLEDNASASALLGIRSWQTRALLIKALIDQGYMKQILVSNDWLFGFSSYVTNIMDVMDRVNPDGMAFIPLRVIPFLREKGVPQETLAGITVTNPARFLSPTLRAS

SEQ ID NO: 299 - protein, 310 aa, Octopus vulgaris
  Octopus vulgaris diisopropyl-fluorophosphatase
METIPVDEPLFTKVASDVLGSEGPVFDKSGCFYVVAPEVEKNNKPAGQILCVNLKTNKNAILCEPEIDGYGGIPAGCQFDRLDNLFVADMRLGLLQVKLDGTYKQVATCDSTGQCMQGCNDCAFDYQGNLWITAPAGDIAPAPFRRSMEEPFGSVYCYTNGEMIKIDTGLQFPNGIAVLHLNDGRPQKLIVAETPTKRLWSYDIEAPGKVSNKKVWATIPGDHEGGADGMDFDNDNNLLVANWGSGHIEVFNSEGGNPIQRIKCPFVKPSNIHFKPRSKTLYVTEHENHAVWKFDWYRNGKMQYCEMKSF

SEQ ID NO: 300 - protein, 525 aa, Burkholderia sp.
  Burkholderia sp. JBA3 organophosphorus hydrolase
  SIGNAL (1)...(21): signal sequence
MKTSVHLSLPLLAVVSTVALVACGGDGGNPVVAPAPEPLTVAKASCATGNRPETGLQGQVDASLRANGFNGFNCNLDLVGSYKGDGAGVSFASFKVYAGRTCTYHSTSTGHPVGLQNPGVTVLDITDPATPIRTASLTSIAMLDPLESMRLNGQRQILVASNGYAGVGGPEVDVYDLSSDCRTPQLLASAPVGTGADGGVYTPNSPLSKGHEGAISPDGLTYYMGDFTNNVYRAIDITDPAKPKQIAVFDMKGLPGKAHGLSVSADGNRVYAAAYGLPTLAQVADPAAYPINGFVVLDTSEVQARKPNAAITLISTAFHKDGSASQHTLPMKVAGKSYLVQVDEGGSAGVLTDAGFKAACAAKLPPFPMARIYDIQDDSDPKLVSKLMLETHDPANCAKVAPDVVGLGLYAYGSHFCSVDNRENATALACAYFNSGIRVFDIRDPAKPKELAYFNPASGPLLPGSAHAMLQQWREGGPDLCGAQLHFDFDRKQLVSACMDNGVQVLQFAPNTWPFAQSVASALQQ

SEQ ID NO: 301 - protein, 309 aa, Aplysia californica
  Aplysia californica diisopropyl-fluorophosphatase
MAPTVVSLQFSKIIDDVSGAEGPVFDSNGTFYVVAPGVRKDAKPAGQVVRIDLSSGQKTVLCEPQVNGDGGIPCGCQADKQGNLYVADMRLGILKVKPNGEFTQVARVDEGGRTMQGCNDCSLDYTGNLWVTAPAGDIAPSEFKMSFQESIGSIYCLTSEGKVVHLDTGLRFPNGIAVIHDANRRPVKLIVAETPTRLLLAYDIQGPGLVANKTKWAKLPDCEQEGGPDGMDFDDAGNLLVAHWGAGHIEVFGPDGGEPIKRIKCPFDKPSNVHFEPNSNIVYVTEHTNNALWKFQWENKGMPQYCDKN

SEQ ID NO: 302 - protein, 509 aa, Pan troglodyte
  chimpanzee PH20 precursor XP_527873
  SIGNAL (1)...(35): signal sequence
MGVLKFKHIFFRSFVKSSGVSQIVFTFLLIPCCLTLNFRAPPVIPNVPFLWAWNAPSEFCLGKFDEPLDMSLFSFIGSPRINVTGQDVTIFYVDRLGYYPYIDSITGVTVNGGIPQKISLQDHLDKAKKDITFYMPVDNLGMAVIDWEEWRPTWARNWKPKDVYKNRSIELVQQQNVQLSLTEATEKAKQEFEKAGKDFLVETIKLGKLLRPNHLWGYYLFPDCYNHHYKKPGYNGSCFNVEIKRNDDLSWLWNESTALYPSIYLNTQQSPVAATLYVRNRVQEAIRVSKIPDAKSPLPVFVYTRIVFTDQVLKFLSQDELVYTFGETVALGASGIVIWGTLSIMRSMKSCLLLDNYMETILNPYIINVTLAAKMCSQVLCQEQGVCIRKNWNSSDYLHLNPDNFAIQLEKGGKFTVRGKPTLEDLEQFSEKFYCSCYSTLSCKEKADVKDTDAVDVCIADGVCIDAFLKPPMETEESQIFYNASPSTLSATMFIVSILFLIISSVASL

SEQ ID NO: 303 - protein, 474 aa, Pan troglodyte
  chimpanzee PH20 mature XP_527873
LNFRAPPVIPNVPFLWAWNAPSEFCLGKFDEPLDMSLFSFIGSPRINVTGQDVTIFYVDRLGYYPYIDSITGVTVNGGIPQKISLQDHLDKAKKDITFYMPVDNLGMAVIDWEEWRPTWARNWKPKDVYKNRSIELVQQQNVQLSLTEATEKAKQEFEKAGKDFLVETIKLGKLLRPNHLWGYYLFPDCYNHHYKKPGYNGSCFNVEIKRNDDLSWLWNESTALYPSIYLNTQQSPVAATLYVRNRVQEAIRVSKIPDAKSPLPVFVYTRIVFTDQVLKFLSQDELVYTFGETVALGASGIVIWGTLSIMRSMKSCLLLDNYMETILNPYIINVTLAAKMCSQVLCQEQGVCIRKNWNSSDYLHLNPDNFAIQLEKGGKFTVRGKPTLEDLEQFSEKFYCSCYSTLSCKEKADVKDTDAVDVCIADGVCIDAFLKPPMETEESQIFYNASPSTLSATMFIVSILFLIISSVASL

SEQ ID NO: 304 - protein, 477 aa, Macaca mulatta
  Rhesus monkey PH20 mature EHH17639
LNFRAPPIIPNVPFLWAWNAPSEFCLGKFNEPLDMSLFTLMGSPRINITGQGVTIFYVDRLGYYPYIDLTTGVTVHGGIPQKVSLQDHLDKSKQDILFYMPVDNLGMAVIDWEEWRPTWARNWKPKDVYKNRSIELVQQQNVQLSLPQATDKAKQEFEKAGKDFMLETIKLGRSLRPNHLWGYYLFPDCYNHHYRKPGYNGSCFDVEIKRNDDLSWLWNESTALYPSIYLNTQQSVVVATLYVRNRVREAIRVSKIPDAKNPLPVFVYARLVFTDQVLKFLSREELVSTLGETVALGASGIVIWGSLSITRSMKSCLLLDTYMETILNPYIINVTLAAKMCSQVLCQEQGVCIRKDWNSSDYLHLNPDNFDIRLEKGGKFTVHGKPTVEDLEEFSEKFYCSCYTNLSCKEKADVKDTDAVDVCIADGVCIDASLKPPVETEGSPPIFYNTSSSTVSTTMFIWRLEVWDQGISRIGFF

SEQ ID NO: 305 - protein, 475 aa, Macaca fascicularis
  Cynomolgus monkey PH20 mature P38568.1
LNFRAPPIIPNVPFLWAWNAPSEFCLGKFNEPLDMSLFTLMGSPRINVTGQGVTIFYVDRLGYYPYIDLTTGVTVHGGIPQKVSLQDHLDKSKQDILFYMPVDNLGMAVIDWEEWRPTWARNWKPKDVYKNRSIELVQQQNVQLSLPQATDKAKQEFEKAGKDFMLETIKLGRSLRPNHLWGYYLFPDCYNHHYRKPGYNGSCFDVEIKRNDDLSWLWNESTALYPSIYLNTQQSVVVATLYVRNRVREAIRVSKIPDAKNPLPVFVYARLVFTDQVLKFLSREELVSTLGETVALGASGIVIWGSLSITRSMKSCLLLDTYMETILNPYIINVTLAAKMCSQVLCQEQGVCIRKDWNSSDYLHLNPDNFDIRLEKGGKFTVHGKPTVEDLEEFSEKFYCSCYTNLSCKEKADVKDTDAVDVCIADGVCIDASLKPPVETEGSPPIFYNTSSSTVSTTMFIVNILFLIISSVASL

SEQ ID NO: 306 - protein, 518 aa, Bos taurus
  cow PH20 mature
LDFRAPPLISNTSFLWAWNAPVERCVNRRFQLPPDLRLFSVKGSPQKSATGQFITLFYADRLGYYPHIDEKTGKTVFGGIPQLGNLKSHMEKAKNDIAYYIPNDSVGLAVIDWENWRPTWARNWKPKDVYRDESVELVLQKNPQLSFPEASKIAKVDFETAGKSFMQETLKLGKLLRPNHLWGYYLFPDCYNHNHNQPTYNGNCPDVEKRRNDDLEWLWKESTALFPSVYLNIRLKSTQNAALYVRNRVQEAIRLSKIASVESPLPVFVYARPVFTDGSSTYLSQGDLVNSVGEIVSLGASGIIMWGSLNLSLSMQSCMNLGTYLNTTLNPYIINVTLAAKMCSQVLCHNEGVCTRKHWNSSDYLHLNPMNFAIQTGEGGKYTVPGTVTLEDLQKFSDTFYCSCYANIHCKKRVDIKNVHSVNVCMAEDICIDSPVKLQPSDHSSSQEASTTTFSSISPSTTTATVSPCTPEKHSPECLKVRCSEVIPNVTQKACQSVKLKNISYQSPIQNIKNQTTY

SEQ ID NO: 307 - protein, 439 aa, Bos taurus
  cow PH20 mature AAP55713
LDFRAPPLISNTSFLWAWNAPVERCVNRRFQLPPDLRLFSVKGSPQKSATGQFITLFYADRLGYYPHIDEKTGKTVFGGIPQLGNLKSHLEKAKNDIAYYIPNDSVGLAVIDWENWRPTWARNWKPKDVYRDESVELVLQKNPQLSFPEASKIAKVDFETAGKSFMQETLKLGKLLRPNHLWGYYLFPDCYNHNHNQPTYNGNCPDVEKRRNDDLEWLWKESTALFPSVYLNIRLKSTQNAALYVRNRVQEAIRLSKIASVESPLPVFVYARPVFTDGSSTYLSQGDLVNSVGEIVSLGASGIIMWGSLNLSLSVQSCMNLGTYLNTTLNPYIINVTLAAKMCSQVLCHDGGVCTRKHWNSSDYLHLNPMNFAIQTGEGGKYTVPGTLTLEDLQKFSDTFYCSCYSNLSCKKRVDIKNVHSVDVCMAEDVCIDAFLKPP

SEQ ID NO: 308 - protein, 477 aa, Mus musculus
  mouse PH20 mature NP_001073344.1
VDYRAAPILSNTTFLWIWNVPTERCVGNVNDPIDLSFFSLIGSPRKTATGQPVTLFYVDRLGLYPHIDANQAEHYGGIPQRGDYQAHLRKAKTDIEHYIPDDKLGLAIIDWEEWRPTWLRNWKPKDNYRNKSIELVQSTNPGLSITEATQKAIQQFEEAGRKFMEGTLHLGKFLRPNQLWGYYLFPDCYNNKFQDPKYDGQCPAVEKKRNDNLKWLWKASTGLYPSVYLKKDLKSNRQATLYVRYRVVEAIRVSKVGNASDPVPIFVYIRLVFTDRTSEYLLEDDLVNTIGEIVALGTSGIIIWDAMSLAQRAAGCPILHKYMQTTLNPYIVNVTLAAKMCSQTLCNEKGMCSRRKESSDVYLHLNPSHFDIMLTETGKYEVLGNPRVGDLEYFSEHFKCSCFSRMTCKETSDVKNVQDVNVCVGDNVCIKAKVEPNPAFYLLPGKSLLFMTTLGHVLYHLPQDIFVFPRKTLVSTP

SEQ ID NO: 309 - protein, 477 aa, Rattus norvegicus
  rat PH20 mature NP_446419.1
VDYRATPVLSDTTFVWVWNVPTEACVENVTEPIDLSFFSLIGSPRKTAIGQPVTLFYVDRLGNYPHIDAQQTEHHGGIPQKGDLTTHLVKAKEDVERYIPTDKLGLAIIDWEEWRPTWMRNWTPKDIYRNKSIELVQAADPAINITEATVRAKAQFEGAAKEFMEGTLKLGKHIRPKHLWGFYLFPDCYNNKFQVDNYDGQCPDVEKKRNDDLDWLWKESTGLYPSVYLKKDLKSSRKATLYVRYRVLESIRVSKVSDESNPVPIFVYIRLVFTDHVSEYLLEDDLVNTIGEIVAQGTSGIIIWDAMSLAQRSAGCPILRQYMKTTLNPYIVNVTLAAKMCSQTLCKEKGMCSRKTESSDAYLHLDPSSFSINVTEAGKYEVLGKPEVKDLEYFSEHFKCSCFSKMTCEETSDMRSIQDVNVCMGDNVCIKATLGPNSAFHLLPGKGLLLMTTLAHILHHLPHDIFVFPWKMLVSTP

SEQ ID NO: 310 - protein, 510 aa, Oryctolagus cuniculus
  rabbit PH20 mature NP_001076141.1
ANFRAPPVIPNVPFLWAWNAPTEFCLGKSGEPLDMSLFSLFGSPRKNKTGQGITIFYVDRLGYYPYIDPHTGAIVHGRIPQLGPLQQHLTKLRQEILYYMPKDNVGLAVIDWEEWLPTWLRNWKPKDIYRIKSIELVKSQHPQYNHSYATEKAKRDFEKAGKDFMEETLKLGRLLRPNHLWGYYLFPDCYNHHYDKPNLYKGSCFDIEKKRNDDLSWLWKESTALFPSVYLTSRARSATALSKLYVVRNRVHEAIRVSKIPDDKSPLPNFVYTRLVFTDQIFQFLSHHDLVYTIGEIVALGASGIVVWGSQSLARSMKSCLHLDNYMKTILNPYLINVTLAAKMCNQVLCQEQGVCTRKNWNPNDYLHLNPGNFAIQLGSNGTYKVDGKPTLTDLEQFSKNFQCSCYTNLNCKERTDMNNVRTVNVCAVENVCIDTNVGPQAVTYAPKEKKDVAHILSNTTSINSSTTMSLPFPRKHVSGCLLVLCMYSQYLNICYRLVAIGIQHGYYLK

SEQ ID NO: 311 - protein, 494 aa, Cavia porcellus
  guinea pig PH20 mature NP_001166492.1
DKRAPPLIPNVPLLWVWNAPTEFCIGGTNQPLDMSFFSIVGTPRKNITGQSITLYYVDRLGYYPYIDPHTGAIVHGGLPQLMNLQQHLRKSRQDILFYMPTDSVGLAVIDWEEWRPTWTRNWRPKDIYRNKSIELVKSQHPQYNHSYAVAVAKRDFERTGKAFMLETLKLGKSLRPSSLWGYYLFPDCYNTHFTKPNYDGHCPPIELQRNNDLQWLWNDSTALYPSVYLTSRVRSSQNGALYVRNRVHESIRVSKLMDDKNPLPIYVYIRLVFTDQTTTFLELDDLVHSVGEIVPLGVSGIIIWGSLSLTRSLVSCIGLENYMKGTLLPYLINVTLAAKMCGQVLCKNQGICTRKDWNTNTYLHLNATNFDIELQQNGKFVVHGKPSLEDLQEFSKNFHCSCYTNVACKDRLDVHNVRSVNVCTANNICIDAVLNFPSLDDDDEPPITDDTSQNQDSISDITSSAPPSSHILPKDLSWCLFLLSIFSQHWKYLL

SEQ ID NO: 312 - protein, 540 aa, Vulpes vulpes
  red fox PH20 precursor Q29152
  SIGNAL (1)...(35): signal sequence
MGVLRFQNIFFRSFLGSSGTTQAVFIFLLIPRCLTQEFRAPPFIPNVSFLWGWNAPTELCAKRFNVQLDLNLFSLIGSPLKTVVGQGIAIFYADRLGYYPHINKTTGKHVNGGIPQLGSLKKHLDKAKKDISHYIETDSMGLAVIDWDSWRPNWARNWRPKHIYKEQSIDLAQQQHIHLNLTEVTQIAQADFEKAARCFMQETLKLGKFLRPNYLWGFYLYPDCYNYNYKNPNYNGSCYDIEERRNDEIDWLWKESTALFPSIYLKSKLKSSPFTALYVRNRVLEAIRVSKVKDIKHPLPIFVYARPVFTDVLLTYLTEDDLVNTIGESVSLGVSGIVMWGSLNLTENVQICTELDTYIKNKLNPYIINVTLAAKMCSQVLCQDEGVCIRKHWNSNDYLHLNPVNFAIQLERSGRYTVQGKPTLEDLQQFSKKFYCACYANTHCRERVDMTDIHTIKVCVGEDVCIDVYLNLVPSGHLPVWKGKYVTSSNIFSVMPPATGPPCVPGRDLNRCLKARFIVEDNSKTTQTGYQSIYIKNKKQ

SEQ ID NO: 313 - protein, 505 aa, Vulpes vulpes
  red fox PH20 mature Q29152
QEFRAPPFIPNVSFLWGWNAPTELCAKRFNVQLDLNLFSLIGSPLKTVVGQGIAIFYADRLGYYPHINKTTGKHVNGGIPQLGSLKKHLDKAKKDISHYIETDSMGLAVIDWDSWRPNWARNWRPKHIYKEQSIDLAQQQHIHLNLTEVTQIAQADFEKAARCFMQETLKLGKFLRPNYLWGFYLYPDCYNYNYKNPNYNGSCYDIEERRNDEIDWLWKESTALFPSIYLKSKLKSSPFTALYVRNRVLEAIRVSKVKDIKHPLPIFVYARPVFTDVLLTYLTEDDLVNTIGESVSLGVSGIVMWGSLNLTENVQICTELDTYIKNKLNPYIINVTLAAKMCSQVLCQDEGVCIRKHWNSNDYLHLNPVNFAIQLERSGRYTVQGKPTLEDLQQFSKKFYCACYANTHCRERVDMTDIHTIKVCVGEDVCIDVYLNLVPSGHLPVWKGKYVTSSNIFSVMPPATGPPCVPGRDLNRCLKARFIVEDNSKTTQTGYQSIYIKNKKQ
